(19) United States
(12) Patent Application Publication
(10) Pub. No.: US 2023/0183353 A1
(43) Pub. Date: Jun. 15, 2023

(54) FC VARIANT AND PREPARATION THEREOF

(71) Applicant: ZYDUS LIFESCIENCES LIMITED, Ahmedabad, Gujarat (IN)

(72) Inventors: Sanjeev Kumar MENDIRATTA, Ahmedabad, Gujarat (IN); Ramkrashan KASERA, Ahmedabad, Gujarat (IN); Arun Kumar SINGH, Ahmedabad, Gujarat (IN); Aashini PARIKH, Ahmedabad, Gujarat (IN); Pankaj KALITA, Ahmedabad, Gujarat (IN); Satish HANDA, Ahmedabad, Gujarat (IN); Anushree SHAH, Ahmedabad, Gujarat (IN); Heena PATEL, Ahmedabad, Gujarat (IN); Hardik PANDYA, Ahmedabad, Gujarat (IN); Vibhuti SHARMA, Ahmedabad, Gujarat (IN); Chirag PATEL, Ahmedabad, Gujarat (IN); Swagat SONI, Ahmedabad, Gujarat (IN); Narayani VYAS, Ahmedabad, Gujarat (IN)

(21) Appl. No.: 17/916,738

(22) PCT Filed: May 21, 2021
(86) PCT No.: PCT/IB2021/054423

§ 371 Date: Oct. 3, 2022

(30) Foreign Application Priority Data
May 21, 2020 (IN) 202021021451

(51) Int. Cl. C07K 16/28; A61P 7/00

(52) U.S. Cl. CPC C07K 16/283; A61P 7/00; C07K 2319/30; C07K 2317/70; C07K 2317/52; C07K 2317/92; C07K 2317/33; C07K 2317/41; A61K 2039/505

(57) ABSTRACT

The present invention relates to Fc variant protein and preparation thereof. Said Fc variant has altered binding affinity towards FcRn. Fc variant prepared according to the current invention can be used for making FcRn antagonist composition or can be used for making an Fc variant containing drug or molecule with altered effector function.

### FIELD OF THE INVENTION

[0001] The present invention relates to Fc variant protein and preparation thereof. Said Fc variant has altered binding affinity towards FcRn. Fc variant prepared according to the current invention can be used for making FcRn antagonist composition or can be used for making an Fc variant containing drug or molecule with altered effector function.

### BACKGROUND OF THE INVENTION

[0002] Neonatal Fc receptor (FcRn) is structurally homologous to the Major Histocompatibility Complex (MHC) Class I heterodimer molecule consisting of a type I transmembrane heavy chain that non-covalently associates with the soluble light chain, β2-microglobulin (β2m). β2m is essential for the proper folding, transport, and function of FcRn, as well as other MHC Class I homologs. The FcRn heavy chain contains three soluble extracellular domains (α1, α2, and α3), a single transmembrane helix, and a cytoplasmic tail. Unlike MHC Class I molecules, FcRn does not directly present antigens to T-cells due to point mutations on the top face of FcRn that disrupt peptide binding. The ability of FcRn to protect IgG from intracellular catabolism is the result of a specific, pH-dependent interaction with the Fc portion of IgG. IgG binds FcRn in a strictly pH-dependent manner at acidic (<6.5) but not neutral pH (>7) mediated by electrostatics between titratable histidine residues in the CH2-CH3 domains of IgG Fc and acidic residues on the α2-domain of FcRn. Binding is further stabilized by a series of hydrophobic interactions and hydrogen bonds between Fc and residues within the FcRn α2-domain and the β2m light chain N-terminus. One IgG molecule can simultaneously bind two FcRn molecules due to the homodimeric nature of IgG resulting in a high affinity interaction between FcRn and IgG at pH 6 due to increased avidity of interaction. The 2:1 interaction between FcRn and IgG is critical for their efficient binding, recycling, and transcytosis in the FcRn expressing cells ultimately leading to the preservation of the long serum persistence of IgG such that protective antibody molecules do not have to be repeatedly produced by B cells thereby providing efficient immunity against infections. Unfortunately this same interaction also contributes to the pathogenicity of those IgG molecules that are reactive toward a self-antigen leading to numerous autoimmune disorders. Mice deficient in FcRn are protected against IgG-mediated autoimmune diseases indicating that FcRn contributes, at least in part, to autoimmunity by maintaining the pathogenic IgGs in circulation longer. Because FcRn contributes to the serum persistence of IgG, therapeutics that block the IgG-FcRn interaction represent a potential treatment modality for IgG-mediated autoimmunity. In fact, high dose intravenous immunoglobulin (IVIg) therapy is FDA-approved for the treatment of IgG-mediated autoimmune diseases where it provides a therapeutic benefit in part by saturation of FcRn receptors, thereby increasing the catabolism of pathogenic IgG. However, IVIg therapy suffers from multiple problems. For example being a blood-derived product, it is susceptible to being contaminated with human pathogens such as HIV, HBV, HCV etc. and thus making the treatment of chronic disorders such as autoimmune diseases highly risky for the recipient patients. It is also expensive, since it requires IgG extraction from the plasma of many blood donors. Also, there is a concern of scalability because it is a human donor dependent product. Thus, novel recombinant approaches are the need of the hour to provide alternative safe, scalable and cost effective treatment options.

[0003] Monoclonal antibody based antagonists have been developed to inhibit the endogenous IgG-FcRn interaction. One approach is the use of monoclonal antibodies directed against FcRn working via the classical antibody: antigen binding mechanism. Examples of such antibodies are M281 and UCB7665 which bind human FcRn to inhibit IgG binding to FcRn and thereby accelerate the clearance of endogenous IgG. A mean reduction of endogenous IgG ranging between 25-80% was observed with M281 in a dose dependent manner. Moreover, single doses of M281 at 30 mg/kg or 60 mg/kg maintained serum IgG at 50% of baseline or below for 18 and 27 days, respectively (1). In healthy subjects, IgG concentrations in the serum were reduced by up to 50% at a single IV dose of 7 mg/kg of UCB7665. The observed reductions in serum IgG concentrations in the current study persisted for weeks, with maximal reductions achieved by days 7 to 10 and thereafter gradually returning to baseline by day 57 (2).

[0004] An alternative antibody engineering approach to reduce IgG levels in serum is to engineer the Fc-domain of IgG such that it has high affinity for FcRn at both pH 6 and pH 7.4. Such a molecule developed using the ‘Abdegs’ (i.e., antibodies that enhance IgG degradation) technology has been found to be effective in treating a murine model of arthritis at 25 to 50 fold lower dose than IVIg indicating that such IgG Fc-based potent antagonists of the IgG-FcRn interaction are an alternative therapeutic intervention in autoimmunity. This molecule, Efgartigimod, is in clinical development by the Netherlands-based biotech company, arGEN-X.

[0005] More recently, synthetic peptides that compete with IgG for binding to FcRn were identified from a phage library. A chemically optimized peptide dimer (SYN1436) that bound FcRn with sub nanomolar affinity at pH 6 and pH 7.4 was effective at increasing the clearance of exogenous IgG in mice as well as endogenous IgG in monkeys, but has not been evaluated in a therapeutic model of IgG-mediated autoimmunity. Alternatively, additional molecules that bind instead to Fc itself, at the CH2-CH3 domain interface to block the IgG-FcRn interaction, include a 13-amino acid cyclic peptide (FcIII) selected by phage display, a computationally designed IgG-Fc binding protein (FcBP6.1), and an endogenous Fc receptor, TRIM21. (3) Thus, the present invention provides an FcRn binder that solves various unmet needs such as, downregulation of the FcRn activity, increasing the circulating half-life of a variety of drugs, targeting of drugs and/or vaccines to specific cell types etc. The FcRn binder of the present invention can be used in treating a wide variety of diseases.

[0006] There is another class of molecules which targets immune-complex (IC) formation and immune-complex mediated FcγR mediated activation. This class of molecules are recombinant Fc multimers such as Pf-06755347 (GL-2045) and CSL730 (M230). These molecules are complex in terms of structure and may result into highly heterogenous population. These molecules are being developed for the treatment of autoimmune disease. Therefore, molecules targeting different mechanisms are under early clinical trial that are being developed as a replacement of intravenous immunoglobulin (IVIg) and subcutaneous immunoglobulin (SCIg) to avoid the dependence on the supply of human plasma and the large doses of product of up to 2 g/kg body weight needed for therapy. In this situation, it would be advantageous to get single drug that has combined effects of multiple mechanism of actions such as FcRn blockade, inhibition of FcγR activation and/or inhibition of full complement activation.

[0007] In one of the aspects, the current invention provides Fc variant molecule which is FcRn binder as well as FcγRs binders and may solve various needs together such as downregulation of the FcRn activity, increasing the circulating half-life of a variety of drugs, IC inhibition, inhibition of cytokine release mediated by IC formation, inhibition of phagocytosis mediated by FcγR activation. Preferably, the Fc variant molecule prepared according to the current invention provides one or more of the above said desired effects at a lesser dose as compared to the dose of IVIg.

### SUMMARY OF THE INVENTION

[0008] The current invention provides novel Fc variant with altered binding affinity towards FcRn, preferably higher binding affinity towards FcRn. In one of the aspects, the Fc variant of the current invention has altered binding affinity towards FcγRs, preferably higher binding affinity towards FcγRs. Preferably, the said Fc variant can be used to develop drug compositions with FcRn antagonist function or increased circulating half-life, or for targeting to specific cells and/or tissues. The present invention also provides method of making novel Fc variant. The Fc variant according to the present invention is further used in the preparation of a drug either for treating diseases where activity of FcRn is detrimental or for increasing the circulating half-life of a drug or for targeting the drug to certain cells or tissues.

### BRIEF DESCRIPTION OF FIGURES

[0009] FIG. 1: It depicts map of the vector used in library generation to make Fc variants of the present invention.

[0010] FIG. 2: It depicts map of the vector used for the generation of Fc monomer and Fc dimer of the present invention.

[0011] FIG. 3: It depicts map of the vector used for the generation of monoclonal antibody containing Fc monomer of the present invention.

[0012] FIG. 4: It depicts the results of experiment to determine the effect of Fc variant (Fc dimer) and IVIg on total IgG serum levels in wild-type mice.

[0013] FIG. 5: It depicts the results of experiment to determine the effect of Fc variant (Fc dimer) and IVIg on serum albumin levels in wild-type mice.

[0014] FIG. 6: It depicts results of experiment to determine the effect of Fc variant on ADCC activity.

[0015] FIG. 7: It depicts results of experiment to determine the effect of Fc variant on platelet count in a mouse model of acute immune thrombocytopenia (ITP).

### DEFINITIONS

[0016] The term “afucosylated” as used herein refers to a glycosylated protein with an N-linked glycan which lacks a core fucose molecule as described in U.S. Pat. No. 8,067,232, the contents of which is incorporated by reference herein in its entirety.

[0017] The term “amino acid modification” as used herein is an amino acid substitution, insertion, and/or deletion in a polypeptide sequence.

[0018] The term “amino acid substitution” or “substitution” as used herein is the replacement of an amino acid at a particular position in a parent polypeptide sequence with another amino acid. For example, the substitution T307N refers to a variant polypeptide, in this case an Fc variant, in which the threonine at position 307 is replaced with asparagine.

[0019] The term “antigen-binding molecule” according to the current invention refers to a protein that can bind to target antigen and comprising an “FcRn binding domain”. FcRn Binding domain according to the current invention is present in Fc protein, preferably, present in Fc variant of the current invention. Preferred “antigen-binding molecule” according to the present invention may include antibody or peptibody or fusion proteins comprising Fc variant of the present invention.

[0020] The term “antibody” as used herein includes whole antibodies and any antigen-binding fragments (i.e., “antigen-binding portion”). An “antibody” refers to a glycoprotein comprising at least two heavy (H) chains and two light (L) chains inter-connected by disulfide bonds, or an antigen-binding portion thereof. Each heavy chain is comprised of a heavy chain variable region (abbreviated herein as V_{H}) and a heavy chain constant region (Fc). The heavy chain constant region is comprised of three domains, CH1, CH2 and CH3. Each light chain is comprised of a light chain variable region (abbreviated herein as V_{L}) and a light chain constant region. The light chain constant region is comprised of one domain, C_{L}. The V_{H} and V_{L} regions can be further subdivided into regions of hyper variability, termed complementarity determining regions (CDR), interspersed with regions that are more conserved, termed framework regions (FR). Each V_{H} and V_{L} is composed of three CDRs and four FRs, arranged from amino-terminus to carboxy-terminus in the following order: FR1, CDR1, FR2, CDR2, FR3, CDR3, FR4. The variable regions of the heavy and light chains contain a binding domain that interacts with an antigen. The constant regions of the antibodies may mediate the binding of the immunoglobulin to host tissues or factors, including various cells of the immune system (e.g., effector cells such as, NK cells, T cells, macrophages and dendritic cells etc.) and the first component (C1q) of the classical complement system.

[0021] The term “operatively linked” is intended to mean that a gene is ligated into a vector such that transcriptional and translational control sequences within the vector serve their intended function of regulating the transcription and translation of such gene.

[0022] The term “Kₐ” is the association rate of interaction between two molecules, whereas the term “K_{d}” is the dissociation rate of the interaction between two molecules. The term “K_{D}” is an affinity rate constant, which is obtained from the ratio of K_{d} to Kₐ. It can be measured by using surface plasma resonance method which is well known in the art.

[0023] The terms “monoclonal antibody” or “monoclonal antibody composition” as used herein refer to a preparation of antibody molecules of single molecular composition. A monoclonal antibody composition displays a single binding specificity and affinity for a particular epitope.

[0024] The term “bispecific antibody” refers to a homogeneous antibody population involved in the highly specific recognition and binding of a two different antigenic determinants, or epitopes. The term “recombinant antibody”, as used herein, includes all antibodies that are prepared, expressed, created or isolated by recombinant means. In certain embodiments, however, such recombinant antibodies can be obtained by in vitro mutagenesis and thus the amino acid sequences of the V_{H} and V_{L} regions of the recombinant antibodies as described herein are sequences that may not naturally exist within the human antibody germline repertoire in vivo. The term “effector function” as used herein is a biochemical event that results from the interaction of an antibody Fc region with an Fc receptor or ligand. Effector functions include but are not limited to ADCC, ADCP, and CDC. The term also represents a physiological event such as circulating half-life of a drug or targeting of a drug to a particular cell or tissue type.

[0025] The term “ADCC” or “antibody dependent cell-mediated cytotoxicity” as used herein is the cell-mediated reaction wherein nonspecific cytotoxic cells that express FcγRs recognize bound antibody on a target cell and subsequently cause lysis of the target cell.

[0026] The term “ADCP” or “antibody dependent cell-mediated phagocytosis” as used herein is the cell-mediated reaction wherein nonspecific cytotoxic cells that express FcγRs recognize bound antibody on a target cell and subsequently cause phagocytosis of the target cell.

[0027] The term “effector cell” as used herein is a cell that expresses one or more Fc receptors and mediates one or more effector functions. Effector cells include but are not limited to monocytes, macrophages, neutrophils, dendritic cells, eosinophils, mast cells, platelets, B cells, large granular lymphocytes, Langerhans' cells, natural killer (NK) cells, and γδT cells, and may be from any organism including but not limited to humans, mice, rats, rabbits, and monkeys.

[0028] The term “Fc” fragment, whose name reflects its ability to crystallize readily. The crystal structure of the human IgG Fc region has been determined (4). In human IgG molecules, the Fc region is generated by papain cleavage N-terminal to Cys 226. The Fc region is central to the effector functions of antibodies.

[0029] The term “Fc protein” as used herein refers to the portion of a single immunoglobulin heavy chain beginning in the hinge region just upstream of the papain cleavage site and ending at the C-terminus of the antibody. Accordingly, a complete Fc domain comprises at least a portion of a hinge (e.g., upper, middle, and/or lower hinge region) domain, a CH2 domain, and a CH3 domain.

[0030] The term “Fc variant containing protein” as used herein refers to any molecule that comprises an Fc variant of the current invention. Preferably, Fc variant containing protein includes antibody, fusion protein and peptibody. Antibody, fusion protein and peptibody as referred herein include any approved or under clinical trial or under pre-clinical trial antibody, fusion protein and peptibody.

[0031] The term “Fc variant containing molecule” as used herein refers to any molecule that comprises an Fc variant of the current invention. It can be fusion product where Fc variant of the current invention is linked or conjugated to a drug, wherein drug can be small peptide or receptor or toxin or any chemical molecule.

[0032] The term “Fc variant protein” or “Fc protein variant” or “Fc variant” as used herein is a Fc protein that differs from that of a wild type Fc protein by virtue of at least one amino acid modification. Fc variant may refer to the Fc variant itself, a composition comprising the Fc variant, or the amino acid sequence that encodes it. Preferably, the Fc variant has at least one amino acid modification compared to the parent protein, e.g. from about one to about ten amino acid modifications, and preferably from about one to about five amino acid modifications compared to the parent.

[0033] The term “EU position” as used herein refers to the amino acid position in the EU numbering convention for the Fc region described in reference 5.

[0034] The term “CH1 domain” as used herein refers to the first (most amino terminal) constant region domain of an immunoglobulin heavy chain that extends from about EU positions 118-215. The CH1 domain is adjacent to the V_{H} domain and amino terminal to the hinge region of an immunoglobulin heavy chain molecule, and does not form a part of the Fc region of an immunoglobulin heavy chain.

[0035] The term “hinge region” as used herein refers to the portion of a heavy chain molecule that joins the CH1 domain to the CH2 domain. This hinge region comprises approximately 25 residues and is flexible, thus allowing the two N-terminal antigen binding regions to move independently. Hinge regions can be subdivided into three distinct domains: upper, middle, and lower hinge domains (6). The Fc variant of the present invention can include all or a portion of a hinge region.

[0036] The term “CH2 domain” as used herein refers to the portion of a heavy chain immunoglobulin molecule that extends from about EU positions 231-340.

[0037] The term “CH3 domain” as used herein refers to the portion of a heavy chain immunoglobulin molecule that extends approximately 110 residues from N-terminus of the CH2 domain, e.g., from about position 341-446 (EU numbering system).

[0038] The term “Fc gamma receptor” or “FcγR” as used herein is meant any member of the family of proteins that bind the IgG antibody Fc region and is encoded by an FcγR gene. In humans, this family includes but is not limited to FcγRI (CD64), including isoforms FcγRIa, FcγRIb, and FcγRIc; FcγRII (CD32), including isoforms FcγRIIa (including allotypes H131 and R131), FcγRIIb (including FcγRIIb-1 and FcγRIIb-2), and FcγRIIc; and FcγRIII (CD16), including isoforms FcγRIIIa (including allotypes V158 and F158) and FcγRIIIb (including allotypes FcγRIIIb-NA1 and FcγRIIIb-NA2) (7), as well as any undiscovered human FcγRs or FcγR isoforms or allotypes. An FcγR may be from any organism, including but not limited to humans, mice, rats, rabbits, and monkeys. Mouse FcγRs include but are not limited to FcγRI (CD64), FcγRII (CD32), FcγRIII (CD16), and FcγRIII-2 (CD16-2), as well as any undiscovered mouse FcγRs or FcγR isoforms or allotypes.

[0039] The term “FcRn” or “neonatal Fc Receptor” as used herein is a protein that binds the IgG antibody Fc region and is encoded at least in part by an FcRn gene. The FcRn may be from any organism, including but not limited to humans, mice, rats, rabbits, and monkeys. As is known in the art, the functional FcRn protein comprises two polypeptides, often referred to as the heavy chain and light chain. The light chain is beta-2-microglobulin and the heavy chain is encoded by the FcRn gene. Unless otherwise noted herein, FcRn or an FcRn protein refers to the complex of FcRn heavy chain with beta-2-microglobulin.

[0040] The term “wild-type Fc” as used herein is an unmodified Fc polypeptide that is subsequently modified to generate a variant. The wild-type Fc may be a naturally occurring polypeptide, or recombinant version of a naturally occurring polypeptide. The wild-type Fc may refer to the unmodified Fc polypeptide itself, compositions that comprise the unmodified Fc polypeptide, or the amino acid sequence that encodes it.

[0041] The term “position” as used herein is a location in the sequence of a protein. Positions may be numbered sequentially or according to an established format, for example the EU index as in Kabat. For example, position 305 is a position in the human antibody IgG₁.

[0042] The terms “patient” and “subject” are used interchangeably and are used in their conventional sense to refer to a living organism suffering from or prone to a condition that can be prevented or treated by administration of a composition of the present invention, and includes both humans and non-human animals. Examples of subjects include, but are not limited to, humans, chimpanzees and other apes and monkey species; farm animals such as cattle, sheep, pigs, goats and horses; domestic mammals such as dogs and cats; laboratory animals including rodents such as mice, rats and guinea pigs; birds, including domestic, wild and game birds such as chickens, turkeys and other gallinaceous birds, ducks, geese, and the like. The term does not denote a particular age. Thus, adult, juvenile and new born individuals are of interest.

[0043] The term “residue” as used herein is a position in a protein and its associated amino acid identity. For example, Threonine 307 (also referred to as Thr307, also referred to as T307) is a residue in the human antibody IgG₁.

[0044] The term “immunoconjugate” or “conjugate” as used herein refers to a compound or a derivative thereof that is linked to a cell binding agent (i.e., antibody or Fc variant as described herein) and is defined by a generic formula: A-L-D, wherein A=cell binding agent or antibody or Fc variant of the present invention, L=linker and D=Drug (toxin or pharmaceutical drug). Immunoconjugates can also be defined by the generic formula in reverse order: A-L-D.

[0045] The term “linker” is any chemical moiety that is capable of linking a compound, usually a drug, such as a maytansinoid or auristatin, to a cell-binding agent such as an anti FcRn or a fragment thereof in a stable, covalent manner. Linkers can be susceptible to or be substantially resistant to acid-induced cleavage, light-induced cleavage, peptidase-induced cleavage, esterase-induced cleavage, and disulfide bond cleavage, at conditions under which the compound or the antibody remains active. Suitable linkers are well known in the art and include, for example, disulfide groups, thioether groups, acid labile groups, photolabile groups, peptidase labile groups and esterase labile groups. Linkers also include charged linkers, and hydrophilic forms thereof as described herein and know in the art.

[0046] The term an “antagonist” is one which inhibits or reduces biological activity of the antigen it binds, such as FcRn. In a certain embodiment antagonist substantially or completely inhibits the biological activity of the antigen such as FcRn. Desirably, the biological activity is reduced by 10%, 20%, 30%, 50%, 70%, 80%, 90%, 95%, or even 100%.

[0047] The term “treatment” or “therapeutics” as used herein, refers to any treatment of a disease in a mammal, particularly in a human. It includes: (a) preventing the disease from occurring in a subject which may be predisposed to the disease or at risk of acquiring the disease but has not yet been diagnosed as having it; (b) inhibiting the disease, i.e., arresting its development; and (c) relieving the disease, i.e., causing regression of the disease.

[0048] The term “wild type” or “WT” herein is an amino acid sequence or a nucleotide sequence that is found in nature, including allelic variations. A WT protein has an amino acid sequence or a nucleotide sequence that has not been intentionally modified.

[0049] The term “non-naturally encoded amino acid” refers to an amino acid that is not one of the common amino acids or pyrolysine, pyrroline-carboxy-lysine, or selenocysteine. Other terms that may be used synonymously with the term “non-naturally encoded amino acid” are “non-natural amino acid”, “unnatural amino acid”, “non-naturally-occurring amino acid” and variously hyphenated and non-hyphenated versions thereof. The term “non-naturally encoded amino acid” also includes, but is not limited to, amino acids that occur by modification (e.g. post-translational modifications) of a naturally encoded amino acid (including but not limited to, the 20 common amino acids or pyrrolysine, pyrroline-carboxy-lysine, and selenocysteine) but are not themselves naturally incorporated into a growing polypeptide chain by the translation complex. Examples of such non-naturally-occurring amino acids include, but are not limited to, N-acetylglucosaminyl-L-serine, N-acetylglucosaminyl-L-threonine and Ophosphotyrosine.

TABLE 1
Abbreviations of amino acid as used in the current application

| | Abbreviation | Abbreviation |
|---|---|---|
| Full Name | (3 Letter) | (1 Letter) |
| Alanine | Ala | A |
| Arginine | Arg | R |
| Asparagine | Asn | N |
| Aspartate | Asp | D |
| Cysteine | Cys | C |
| Glutamate | Glu | E |
| Glutamine | Gln | Q |
| Glycine | Gly | G |
| Histidine | His | H |
| Isoleucine | Ile | I |
| Leucine | Leu | L |
| Lysine | Lys | K |
| Methionine | Met | M |
| Phenylalanine | Phe | F |
| Proline | Pro | P |
| Serine | Ser | S |
| Threonine | Thr | T |
| Tryptophan | Trp | W |
| Tyrosine | Tyr | Y |
| Valine | Val | V |

### Other Abbreviations Used in the Current Patent Application

[0050] %: percentage

[0051] ° C.: degree Celsius

[0052] μg: microgram

[0053] μL: microliter

[0054] A: Adenine

[0055] ADCC: Antibody-dependent cellular cytotoxicity

[0056] C: Cytosine

[0057] CDC: Complement-dependent cytotoxicity

[0058] CFU: Colony forming unit

[0059] CHO: Chinese Hamster Ovary

[0060] DNA: Deoxyribonucleic acid

[0061] ELISA: Enzyme linked immunosorbent assay

[0062] EC₅₀: 50% of maximal effective concentration of any drug

[0063] EC₇₅: 75% of maximal effective concentration of any drug

[0064] Fc: Fragment crystallizable

[0065] FcGRT: Fc fragment of IgG receptor and transporter

[0066] FcRn: Neonatal Fc receptor

[0067] FcγRs: Fc gamma receptors

[0068] G: Guanine

[0069] h: Hour

[0070] H₂SO₄: Sulfuric acid

[0071] HRP: Horseradish peroxidase

[0072] IC: Immune-complex

[0073] IgG: Immunoglobulin G

[0074] IPTG: Isopropyl β-D-1-thiogalactopyranoside

[0075] ITP: Acute immune thrombocytopenia

[0076] IVIg: Intravenous immunoglobulin

[0077] Kₐ/k_{assoc}: Association constant

[0078] K_{d}/k_{dissoc}: Dissociation constant

[0079] K_{D}: Equilibrium dissociation constant

[0080] M: molar

[0081] mg: milligram

[0082] MgCl₂: Magnesium chloride

[0083] min: Minute

[0084] mL milliliter

[0085] mM: millimolar

[0086] MOI: Multiplicity of infection

[0087] NaCl: Sodium chloride

[0088] NaHCO₃: Sodium bicarbonate

[0089] ng: nanogram

[0090] nm: nanometer

[0091] OD: Optical density

[0092] OPD: o-phenylenediamine dihydrochloride

[0093] PBS: Phosphate buffered saline

[0094] PBST: Phosphate buffered saline with tween 0.05%

[0095] PEG: Polyethylene glycol

[0096] PFU: Plaque-forming unit

[0097] rFcRn: Recombinant neonatal Fc receptor

[0098] rhFcRn: Recombinant human neonatal Fc receptor

[0099] rpm: Round per minute

[0100] s: Second

[0101] SCIg: Subcutaneous immunoglobulin

[0102] SEQ/seq: Sequence

[0103] SPR: Surface plasmon resonance

[0104] T: Thymine

[0105] YT media: Yeast extract tryptone media

### EMBODIMENTS OF THE INVENTION

[0106] The disclosure of the present invention relates to novel Fc variant protein that can be used for therapeutic purposes.

[0107] In one embodiment, the Fc variant protein or Fc variant containing protein or Fc variant containing molecule of the present invention binds with high affinity to human FcRn relative to the wild-type Fc protein. In one of the embodiments, the Fc variant of the present invention has a K_{D} of 10⁻⁸ M or less, more preferably 10⁻¹⁰ M or less for FcRn. K_{D} value is a measurement of the binding affinity of the antibody towards its target antigen.

[0108] In one of the embodiments, the Fc variant according to the current invention has altered (increased or decreased) affinity for an Fc gamma receptor relative to the affinity of a wild-type IgG₁ Fc region for the said Fc gamma receptor. In certain embodiments, the Fc variant has increased affinity for FcγRIIIa (CD16a) relative to the affinity of a wild-type IgG₁ Fc region for FcγRIIIa (CD16a).

[0109] In one of the embodiments, the Fc variant of the present invention has a K_{D} of 10⁻⁷ M or less for FcγRIIIa (CD16a), including allotypes V158 and F158. In one of the embodiments, the Fc variant of the present invention inhibits immune-complex mediated FcγR activation as assessed by inhibition of ADCC. In one of the embodiments, the Fc variant of the present invention inhibits phagocytosis mediated by FcγRs. In one of the embodiments, the Fc variant of the present invention inhibits cytokine release such as IL-6 or IL-8 mediated by FcγRs.

[0110] In one embodiment, the amino acid sequence of Fc variant is of the IgG₁, IgG₂, IgG₃, IgG₄ or IgG₂/G₄ isotype, preferably the IgG₁ isotype.

[0111] In another embodiment, one or more Fc variant of the present invention has modified or reduced or no effector function. In one of the embodiments, the Fc variant or Fc variant containing protein of the present invention has reduced potential to cause the safety issue of ADCC and CDC. In one of the preferred embodiments, the Fc variant of the current invention has no CDC activity. In one of the preferred embodiments, the Fc variant of the current invention has reduced ADCC activity as compared to ADCC activity of wild-type Fc or ADCC activity of IVIg. In one of the embodiments, the Fc variant of the current invention has reduced or no ADCP activity. In one of the embodiments, the Fc variant of the present invention does not interfere with the binding property of FcRn to albumin.

[0112] In one of the embodiments, the Fc variant of the present invention cross-reacts with FcRn from species other than human.

[0113] In one of the embodiments, the Fc variant of the present invention has higher binding specificity towards human FcRn.

[0114] In one of the embodiments, Fc variant or Fc variant containing protein or Fc variant containing molecule of the present invention has an increased half-life in subject. In certain embodiments, polyethylene glycol or human serum albumin may link to Fc variant of the current invention to further increase the half-life of the said Fc variant. In an alternate embodiment, the Fc variant of the present invention may include mutations to increase its half-life in the subject. In another alternate embodiment, the Fc variant of the present invention can be expressed in multimer form to increase half-life by increasing the molecular size and affinity through higher avidity of the Fc variant. The term “multimer form” as used herein refers to a form of protein which includes more than one unit of protein, preferably herein Fc protein. For example, it can be dimer, trimer, tetramer, pentamer, hexamer, etc. For example, monomer Fc protein has two binding sites for FcRn as well as FcγRs. In the similar manner, Fc dimer according to the current invention has four binding sites for FcRn as well as FcγRs.

[0115] In another embodiment, the Fc variant of the present invention is able to bind to the monkey FcRn enabling ease of drug development by providing a relevant animal pharmacology and toxicology model.

[0116] In certain embodiments, the Fc variant comprises a variant Fc region that comprises an afucosylated N-linked glycan at EU position 297.

[0117] In one of the embodiments, the Fc variant comprises a variant Fc region that comprises higher sialylation as compared to wild-type IgG.

[0118] In one of the embodiments, the present invention provides a composition comprising Fc variant protein or Fc variant containing protein or Fc variant containing molecule and an acceptable carrier.

[0119] In another embodiment, the Fc variant protein or Fc variant containing protein of the present invention can be used for the treatment of disease such as infections, various cancers, auto immune disorders and the like.

[0120] In certain embodiments, the Fc variant or Fc variant containing protein or Fc variant containing molecule comprise an amino acid sequence selected from sequences as set forth in SEQ ID No. 1 to SEQ ID No. 347. Sequences with SEQ ID No.s from 1 to 347 are described herein in table 3.

[0121] In another embodiment, the Fc variant of the present invention can be used to make full-length antibody, where antibody has Fc variant of the present invention in place of conventional Fc region. Said antibody can be modified form of already approved or discovered antibody, where modified form of existing antibody has Fc variant of the current invention. It can be novel antibody which is developed for any target.

[0122] In a separate embodiment, the Fc variant of the present invention can be used to make a drug with increased half-life, where Fc variant of the present invention is either fused or linked or conjugated to drug of which original half-life in circulation is low.

[0123] In another embodiment, the Fc variant of the present invention can be used to increase the half-life of ADC and reducing its off-target toxicity by increasing its re-circulation through FcRn receptor.

[0124] In one of the embodiments, Fc variant of the present invention can be fused with any drug to improve its half-life and in-vivo stability.

[0125] In one of the embodiments, Fc variant of the present invention can be used to replace albumin in an albumin fusion drug, to improve the pharmacokinetics of the drug.

[0126] In one of the embodiments, mutations in the Fc variant of the present invention can be used to improve the affinity of full antibody towards FcRn at pH 6, to increase its circulating half-life by reducing catabolism.

[0127] In one of the embodiments, the Fc variant containing antibody molecule can be used as a scavenger to remove pathogenic proteins or toxins from the circulation such as TNF alpha, VEGF etc.

[0128] In one of the embodiments, the Fc variant containing antibody molecule or protein can be used as a trapper to catch desired proteins, peptides, carbohydrates or drugs from the environment and bring inside the FcRn expressing target cell.

[0129] In one of the embodiments, Fc variant of the present invention can be used to develop monomeric Fc fusion protein in fusion with any therapeutic peptide to improve its penetration in a tissue along with retaining its FcRn binding activity.

[0130] In one of the embodiments, Fc variant of the present invention can be fused with PEG to further improve its circulating half-life.

[0131] In one of the embodiments, Fc variant of the present invention can be used for delivering drugs via non-invasive route like pulmonary administration.

[0132] In one of the embodiments, Fc variant of the present invention blocks IgG binding site on FcRn and compete with endogenous IgG for FcRn leading to faster clearance of endogenous IgG.

[0133] In one of the embodiments, Fc variant of the present invention can improve the potency/efficacy of a drug independent of its pharmacokinetic half-life.

[0134] In one of the embodiments, Fc variant of the present invention in fusion with immunogen/antigen can improve the delivery of antigen to the FcRn expressing APCs leading to improved immune response.

[0135] In one of the embodiments, Fc variant of the present invention can be used to deliver nanoparticle laden drugs orally at various organs through intestinal epithelium.

[0136] In one of the embodiments, Fc variant of the present invention in fusion with a peptide/immunogen can be used for intranasal immunization as a general delivery route for subunit vaccines against many mucosal pathogens.

[0137] In one of the embodiments, Fc variant of the present invention in fusion with any broadly neutralizing antibody can be used for extending the half-life of such antibodies and also to enhance mucosal localization that confers immune protection against viral entry in the gastrointestinal or cervicovaginal tracts.

### DETAILED DESCRIPTION OF THE INVENTION

[0138] In one embodiment, the Fc variant protein or Fc variant containing protein or Fc variant containing molecule of the present invention binds with high affinity to human FcRn. The Fc variant of the current invention has lower K_{D} value than native Fc for binding to FcRn at pH 6.0. The Fc variant of the present invention has a K_{D} of 10⁻⁸ M or less, more preferably 10⁻¹⁰ M or less for FcRn at pH 6.0. K_{D} value is a measurement of the binding affinity of the antibody towards its target antigen.

[0139] Amino Acid Sequences of the Fc Variants

[0140] Fc variant of the present invention comprises amino acid substitution at CH2 domain or at CH3 domain or at CH2 and CH3 domain of the Fc protein. More preferably, the Fc variant of the present invention comprises amino acid substitution at one or more residue(s) selected from EU250, EU251, EU252, EU253, EU254, EU255, EU256, EU257, EU258, EU259, EU307, EU308, EU309, EU310, EU311, EU375, EU377, EU379, EU380, EU381, EU432, EU433, EU434 and EU435. Preferred substituting amino acids for the positions EU250, EU251, EU252, EU253, EU307, EU308, EU309, EU375, EU377, EU379, EU380, EU381, EU432, EU433, EU434, EU435, EU436 and EU437 are shown in table 2.

TABLE 2
Preferred substituting amino acid at specific EU position in Fc variant

| Residue | Substituting amino acid |
|---|---|
| EU250 | Alanine (A), Histidine (H), Valine (V), Lysine(K), Glutamine (Q) or Arginine |
| | (R) |
| EU251 | Glutamic acid (E), Glutamine (Q), Arginine (R), Tyrosine (Y), Cysteine (C), |
| | Valine (V), Histidine (H) or Alanine (A) |
| EU252 | Glutamine (Q), Tyrosine (Y), Histidine (H), Phenylalanine (F), Leucine (L) or |
| | Valine (V) |
| EU253 | Glutamine (Q), Arginine (R), Threonine (T), Asparagine (N), Proline (P), |
| | Serine (S) or Tyrosine (Y) |
| EU254 | Histidine (H) |
| EU255 | Glutamine (Q) |
| EU256 | Glutamine (Q) |
| EU257 | Glutamine (Q) |
| EU258 | Tyrosine (Y) or Tryptophan(W) |
| EU259 | Arginine (R) or Glycine (G) |
| EU307 | Asparagine (N), Tyrosine (Y) or Glutamine (Q) |
| EU308 | Proline (P), Aspartic acid (D), Threonine (T) or Serine (S) |
| EU309 | Tyrosine (Y), Serine (S), Threonine (T) or Glutamine (Q) |
| EU310 | Proline (P) or Valine (V) |
| EU311 | Histidine (H) or Asparagine (N) |
| EU375 | Arginine (R) |
| EU377 | Leucine (L) |
| EU379 | Isoleucine (I) |
| EU380 | Glutamine (Q) |
| EU381 | Glutamine (Q) |
| EU432 | Serine (S), Cysteine (C), Tryptophan (W), Phenylalanine (F), Alanine (A), |
| | Methionine (M), Glutamine (Q), Tyrosine (Y) or Proline (P) |
| EU433 | Arginine (R), Threonine (T), Glutamine (Q), Proline (P), Lysine (K), |
| | Phenylalanine (F), Serine (S), Asparagine (N) or Methionine (M) |
| EU434 | Tryptophan (W), Tyrosine (Y), Histidine (H), Phenylalanine (F), Aspartic |
| | acid (D), Glycine (G), Isoleucine (I), Leucine (L), Threonine (T) or |
| | Glutamine (Q) |
| EU435 | Glutamine (Q), Lysine (K), Proline (P), Asparagine (N) or Aspartic acid (D) |
| EU436 | Phenylalanine (F) |
| EU437 | Asparagine (N) |

[0141] In a preferred embodiment, the amino acid substitution of the Fc variant according to the present invention is selected from T250Q, T250R, T250A, T250H, T250V, T250K, L251H, L251A, L251E, L251Q, L251R, L251Y, L251C, L251V, M252L, M252V, M252Q, M252Y, M252H, M252F, I253P, I253S, I253Q, I253R, I253T, I253N, I253Y, S254H, R255Q, T256Q, P257Q, E258Y, E258W, V259R, V259G, T307N, T307Y, T307Q, V308P, V308D, V308T, V308S, L309Y, L309S, L309T, L309Q, H310P, H310V, Q311H, Q311N, S375R, I377L, V379I, E380Q, W381Q, L432S, L432C, L432Q, L432Y, L432P, L432W, L432F, L432A, L432M, H433R, H433T, H433Q, H433P, H433K, H433F, H433S, H433N, H433M, N434W, N434Y, N434H, N434F, N434D, N434G, N434I, N434L, N434T, N434Q, H435Q, H435K, H435P, H435N, H435D, Y436F, T437N and suitable combination thereof.

[0142] Fc variant of the present invention may comprise substitution at two or more positions in wild-type Fc, which is herein referred to as a “combination” of substitutions. The amino acid sequence of wild type Fc is mentioned as SEQ ID No. 348. Preferred combination of amino acid substitutions of Fc variant are shown in table 3. Amino acid substitutions that are present in combination are separated by the symbol “/”.

TABLE 3
Preferred combination of substituting amino
acids at specific EU position in Fc variant

| SEQ | |
|---|---|
| ID No. | Combination of amino acid substitutions |
| 1 | T250Q/L251H/M252L/I253P |
| 2 | T250R/L251A/M252V/I253S |
| 3 | T307N/V308P/L309Y |
| 4 | S375R/I377L |
| 5 | V379I/E380Q/W381Q |
| 6 | H433R/N434W |
| 7 | L432S/H433T/N434Y |
| 8 | H433R/N434Y |
| 9 | H433T/N434H/H435Q |
| 10 | H433Q/N434W |
| 11 | H433P/N434W/H435K |
| 12 | H433R/N434H/H435K |
| 13 | L432C/H433K/N434F |
| 14 | L432W/H433F/N434D/H435K |
| 15 | L432F/H433S/N434G |
| 16 | H433R/N434F |
| 17 | H433P/N434Y |
| 18 | L432A/H433S/N434F |
| 19 | H433P/N434W |
| 20 | L432M/H433P/N434F |
| 21 | L432A/H433K/N434F |
| 22 | T307N/V308P/L309Y/H433R/N434W |
| 23 | T307N/V308P/L309Y/L432S/H433T/N434Y |
| 24 | T307N/V308P/L309Y/H433R/N434Y |
| 25 | T250Q/L251H/M252L/I253P/H433T/N434H/H435Q |
| 26 | S375R/I377L/L432C/H433K/N434F |
| 27 | T307N/V308P/L309Y/V379I/E380Q/W381Q/H433R/N434W |
| 28 | T307Y/V308D |
| 29 | T250A/T307Y/V308D |
| 30 | T250H/L251E/M252Q/I253Q |
| 31 | T250A/L251Q/M252Y/I253R |
| 32 | T250A/L251R/M252H/I253T |
| 33 | T250V/L251Y/M252Q |
| 34 | T250K/L251C/M252Q/I253N |
| 35 | L251V/M252F/I253P |
| 36 | T256Q/P257Q/E258Y/V259R |
| 37 | E258W/V259G |
| 38 | I253Y/S254H/R255Q |
| 39 | T307Q/V308T/L309S |
| 40 | L309T/H310P/Q311H |
| 41 | V308S/L309Q/H310V/Q311N |
| 42 | L432M/H433P/N434I/H435P |
| 43 | L432Q/H433N/H435N |
| 44 | L432Y/H433R/N434L/H435P |
| 45 | N434T/H435D/Y436F/T437N |
| 46 | L432P/H433M/N434Q |
| 47 | V308S/L309Q/H310V/Q311N/L432Q/H433N/H435N |
| 48 | T250A/L251Q/M252Y/I253R/L432Y/H433R/N434L/H435P |
| 49 | E258W/V259G/N434T/H435D/Y436F/T437N |
| 50 | V379I/E380Q/W381Q/H433R/N434W |
| 51 | T250R/L251A/M252V/I253S/H433R/N434W |
| 52 | T250A/T307Y/V308D/H433R/N434W |
| 53 | T307Q/V308T/L309S/H433R/N434W |
| 54 | T256Q/P257Q/E258Y/V259R/H433R/N434W |
| 55 | T250H/L251E/M252Q/I253Q/H433R/N434W |
| 56 | L309T/H310P/Q311H/H433R/N434W |
| 57 | T250A/L251R/M252H/I253T/H433R/N434W |
| 58 | T250V/L251Y/M252Q/H433R/N434W |
| 59 | T250K/L251C/M252Q/I253N/H433R/N434W |
| 60 | I253Y/S254H/R255Q/H433R/N434W |
| 61 | L251V/M252F/I253P/H433R/N434W |
| 62 | V379I/E380Q/W381Q/L432S/H433T/N434Y |
| 63 | T250R/L251A/M252V/I253S/L432S/H433T/N434Y |
| 64 | T250A/T307Y/V308D/L432S/H433T/N434Y |
| 65 | T307Q/V308T/L309S/L432S/H433T/N434Y |
| 66 | T256Q/P257Q/E258Y/V259R/L432S/H433T/N434Y |
| 67 | T250H/L251E/M252Q/I253Q/L432S/H433T/N434Y |
| 68 | L309T/H310P/Q311H/L432S/H433T/N434Y |
| 69 | T250A/L251R/M252H/I253T/L432S/H433T/N434Y |
| 70 | T250V/L251Y/M252Q/L432S/H433T/N434Y |
| 71 | T250K/L251C/M252Q/I253N/L432S/H433T/N434Y |
| 72 | I253Y/S254H/R255Q/L432S/H433T/N434Y |
| 73 | L251V/M252F/I253P/L432S/H433T/N434Y |
| 74 | V379I/E380Q/W381Q/H433R/N434Y |
| 75 | T250R/L251A/M252V/I253S/H433R/N434Y |
| 76 | T250A/T307Y/V308D/H433R/N434Y |
| 77 | T307Q/V308T/L309S/H433R/N434Y |
| 78 | T256Q/P257Q/E258Y/V259R/H433R/N434Y |
| 79 | T250H/L251E/M252Q/I253Q/H433R/N434Y |
| 80 | L309T/H310P/Q311H/H433R/N434Y |
| 81 | T250A/L251R/M252H/I253T/H433R/N434Y |
| 82 | T250V/L251Y/M252Q/H433R/N434Y |
| 83 | T250K/L251C/M252Q/I253N/H433R/N434Y |
| 84 | I253Y/S254H/R255Q/H433R/N434Y |
| 85 | L251V/M252F/I253P/H433R/N434Y |
| 86 | T250Q/L251H/M252L/I253P/T307N/V308P/L309Y/H433T/ |
| | N434H/H435Q |
| 87 | T307N/V308P/L309Y/H433Q/N434W |
| 88 | T307N/V308P/L309Y/H433P/N434W/H435K |
| 89 | T307N/V308P/L309Y/H433R/N434H/H435K |
| 90 | T307N/V308P/L309Y/S375R/I377L/L432C/H433K/N434F |
| 91 | T307N/V308P/L309Y/L432W/H433F/N434D/H435K |
| 92 | T307N/V308P/L309Y/L432F/H433S/N434G |
| 93 | T307N/V308P/L309Y/V379I/E380Q/W381Q |
| 94 | T250R/L251A/M252V/I253S/T307N/V308P/L309Y |
| 95 | T307N/V308P/L309Y/H433R/N434F |
| 96 | T307N/V308P/L309Y/H433P/N434Y |
| 97 | T307N/V308P/L309Y/L432A/H433S/N434F |
| 98 | T307N/V308P/L309Y/H433P/N434W |
| 99 | T307N/V308P/L309Y/L432M/H433P/N434F |
| 100 | T307N/V308P/L309Y/L432A/H433K/N434F |
| 101 | T256Q/P257Q/E258Y/V259R/T307N/V308P/L309Y |
| 102 | T250H/L251E/M252Q/I253Q/T307N/V308P/L309Y |
| 103 | T307N/V308P/L309Y/L432M/H433P/N434I/H435P |
| 104 | T307N/V308P/L309Y/L432P/H433M/N434Q |
| 105 | T250A/L251Q/M252Y/I253R/T307N/V308P/L309Y/L432Y/ |
| | H433R/N434L/H435P |
| 106 | E258W/V259G/T307N/V308P/L309Y/N434T/H435D/Y436F/ |
| | T437N |
| 107 | T250A/L251R/M252H/I253T/T307N/V308P/L309Y |
| 108 | T250V/L251Y/M252Q/T307N/V308P/L309Y |
| 109 | T250K/L251C/M252Q/I253N/T307N/V308P/L309Y |
| 110 | I253Y/S254H/R255Q/T307N/V308P/L309Y |
| 111 | L251V/M252F/I253P/T307N/V308P/L309Y |
| 112 | T250Q/L251H/M252L/I253P/V379I/E380Q/W381Q/H433T/ |
| | N434H/H435Q |
| 113 | T250Q/L251H/M252L/I253P/T307Q/V308T/L309S/H433T/ |
| | N434H/H435Q |
| 114 | T250Q/L251H/M252L/I253P/T256Q/P257Q/E258Y/V259R/ |
| | H433T/N434H/H435Q |
| 115 | T250Q/L251H/M252L/I253P/L309T/H310P/Q311H/H433T/ |
| | N434H/H435Q |
| 116 | T250Q/L251H/M252L/I253P/1253Y/S254H/R255Q/H433T/ |
| | N434H/H435Q |
| 117 | V379I/E380Q/W381Q/H433Q/N434W |
| 118 | T250R/L251A/M252V/I253S/H433Q/N434W |
| 119 | T250A/T307Y/V308D/H433Q/N434W |
| 120 | T307Q/V308T/L309S/H433Q/N434W |
| 121 | T256Q/P257Q/E258Y/V259R/H433Q/N434W |
| 122 | T250H/L251E/M252Q/I253Q/H433Q/N434W |
| 123 | L309T/H310P/Q311H/H433Q/N434W |
| 124 | T250A/L251R/M252H/I253T/H433Q/N434W |
| 125 | T250V/L251Y/M252Q/H433Q/N434W |
| 126 | T250K/L251C/M252Q/I253N/H433Q/N434W |
| 127 | I253Y/S254H/R255Q/H433Q/N434W |
| 128 | L251V/M252F/I253P/H433Q/N434W |
| 129 | V379I/E380Q/W381Q/H433P/N434W/H435K |
| 130 | T250R/L251A/M252V/I253S/H433P/N434W/H435K |
| 131 | T250A/T307Y/V308D/H433P/N434W/H435K |
| 132 | T307Q/V308T/L309S/H433P/N434W/H435K |
| 133 | T256Q/P257Q/E258Y/V259R/H433P/N434W/H435K |
| 134 | T250H/L251E/M252Q/I253Q/H433P/N434W/H435K |
| 135 | L309T/H310P/Q311H/H433P/N434W/H435K |
| 136 | T250A/L251R/M252H/I253T/H433P/N434W/H435K |
| 137 | T250V/L251Y/M252Q/H433P/N434W/H435K |
| 138 | T250K/L251C/M252Q/I253N/H433P/N434W/H435K |
| 139 | I253Y/S254H/R255Q/H433P/N434W/H435K |
| 140 | L251V/M252F/I253P/H433P/N434W/H435K |
| 141 | V379I/E380Q/W381Q/H433R/N434H/H435K |
| 142 | T250R/L251A/M252V/I253S/H433R/N434H/H435K |
| 143 | T250A/T307Y/V308D/H433R/N434H/H435K |
| 144 | T307Q/V308T/L309S/H433R/N434H/H435K |
| 145 | T256Q/P257Q/E258Y/V259R/H433R/N434H/H435K |
| 146 | T250H/L251E/M252Q/I253Q/H433R/N434H/H435K |
| 147 | L309T/H310P/Q311H/H433R/N434H/H435K |
| 148 | T250A/L251R/M252H/I253T/H433R/N434H/H435K |
| 149 | T250V/L251Y/M252Q/H433R/N434H/H435K |
| 150 | T250K/L251C/M252Q/I253N/H433R/N434H/H435K |
| 151 | I253Y/S254H/R255Q/H433R/N434H/H435K |
| 152 | L251V/M252F/I253P/H433R/N434H/H435K |
| 153 | S375R/I377L/V379I/E380Q/W381Q/L432C/H433K/N434F |
| 154 | T250R/L251A/M252V/I253S/S375R/I377L/L432C/H433K/ |
| | N434F |
| 155 | T250A/T307Y/V308D/S375R/I377L/L432C/H433K/N434F |
| 156 | T307Q/V308T/L309S/S375R/I377L/L432C/H433K/N434F |
| 157 | T256Q/P257Q/E258Y/V259R/S375R/I377L/L432C/H433K/ |
| | N434F |
| 158 | T250H/L251E/M252Q/I253Q/S375R/I377L/L432C/H433K/ |
| | N434F |
| 159 | L309T/H310P/Q311H/S375R/I377L/L432C/H433K/N434F |
| 160 | T250A/L251R/M252H/I253T/S375R/I377L/L432C/H433K/ |
| | N434F |
| 161 | T250V/L251Y/M252Q/S375R/I377L/L432C/H433K/N434F |
| 162 | V379I/E380Q/W381Q/L432W/H433F/N434D/H435K |
| 163 | T250R/L251A/M252V/I253S/L432W/H433F/N434D/H435K |
| 164 | T250A/T307Y/V308D/L432W/H433F/N434D/H435K |
| 165 | T307Q/V308T/L309S/L432W/H433F/N434D/H435K |
| 166 | T256Q/P257Q/E258Y/V259R/L432W/H433F/N434D/H435K |
| 167 | T250H/L251E/M252Q/I253Q/L432W/H433F/N434D/H435K |
| 168 | L309T/H310P/Q311H/L432W/H433F/N434D/H435K |
| 169 | T250A/L251R/M252H/I253T/L432W/H433F/N434D/H435K |
| 170 | T250V/L251Y/M252Q/L432W/H433F/N434D/H435K |
| 171 | T250K/L251C/M252Q/I253N/L432W/H433F/N434D/H435K |
| 172 | I253Y/S254H/R255Q/L432W/H433F/N434D/H435K |
| 173 | L251V/M252F/I253P/L432W/H433F/N434D/H435K |
| 174 | V379I/E380Q/W381Q/L432F/H433S/N434G |
| 175 | T250R/L251A/M252V/I253S/L432F/H433S/N434G |
| 176 | T250A/T307Y/V308D/L432F/H433S/N434G |
| 177 | T307Q/V308T/L309S/L432F/H433S/N434G |
| 178 | T256Q/P257Q/E258Y/V259R/L432F/H433S/N434G |
| 179 | T250H/L251E/M252Q/I253Q/L432F/H433S/N434G |
| 180 | L309T/H310P/Q311H/L432F/H433S/N434G |
| 181 | T250A/L251R/M252H/I253T/L432F/H433S/N434G |
| 182 | T250V/L251Y/M252Q/L432F/H433S/N434G |
| 183 | I253Y/S254H/R255Q/L432F/H433S/N434G |
| 184 | L251V/M252F/I253P/L432F/H433S/N434G |
| 185 | T250R/L251A/M252V/I253S/V379I/E380Q/W381Q |
| 186 | V379I/E380Q/W381Q/H433R/N434F |
| 187 | V379I/E380Q/W381Q/H433P/N434Y |
| 188 | V379I/E380Q/W381Q/L432A/H433S/N434F |
| 189 | V379I/E380Q/W381Q/H433P/N434W |
| 190 | V379I/E380Q/W381Q/L432M/H433P/N434F |
| 191 | V379I/E380Q/W381Q/L432A/H433K/N434F |
| 192 | T250A/T307Y/V308D/V379I/E380Q/W381Q |
| 193 | T307Q/V308T/L309S/V379I/E380Q/W381Q |
| 194 | T256Q/P257Q/E258Y/V259R/V379I/E380Q/W381Q |
| 195 | T250H/L251E/M252Q/I253Q/V379I/E380Q/W381Q |
| 196 | L309T/H310P/Q311H/V379I/E380Q/W381Q |
| 197 | V379I/E380Q/W381Q/L432M/H433P/N434I/H435P |
| 198 | V379I/E380Q/W381Q/L432P/H433M/N434Q |
| 199 | V308S/L309Q/H310V/Q311N/V379I/E380Q/W381Q/L432Q/ |
| | H433N/H435N |
| 200 | T250A/L251Q/M252Y/I253R/V379I/E380Q/W381Q/L432Y/ |
| | H433R/N434L/H435P |
| 201 | E258W/V259G/V379I/E380Q/W381Q/N434T/H435D/Y436F/ |
| | T437N |
| 202 | T250A/L251R/M252H/I253T/V379I/E380Q/W381Q |
| 203 | T250V/L251Y/M252Q/V379I/E380Q/W381Q |
| 204 | T250K/L251C/M252Q/I253N/V379I/E380Q/W381Q |
| 205 | I253Y/S254H/R255Q/V379I/E380Q/W381Q |
| 206 | L251V/M252F/I253P/V379I/E380Q/W381Q |
| 207 | T250R/L251A/M252V/I253S/H433R/N434F |
| 208 | T250R/L251A/M252V/I253S/H433P/N434Y |
| 209 | T250R/L251A/M252V/I253S/L432A/H433S/N434F |
| 210 | T250R/L251A/M252V/I253S/H433P/N434W |
| 211 | T250R/L251A/M252V/I253S/L432M/H433P/N434F |
| 212 | T250R/L251A/M252V/I253S/L432A/H433K/N434F |
| 213 | T250R/L251A/M252V/I253S/T307Q/V308T/L309S/H433T/ |
| | N434H/H435Q |
| 214 | T250R/L251A/M252V/I253S/T256Q/P257Q/E258Y/V259R/ |
| | H433T/N434H/H435Q |
| 215 | T250R/L251A/M252V/I253S/L309T/H310P/Q311H/H433T/ |
| | N434H/H435Q |
| 216 | T250R/L251A/M252V/I253S/L432M/H433P/N434I/H435P |
| 217 | T250R/L251A/M252V/I253S/L432P/H433M/N434Q |
| 218 | T250R/L251A/M252V/I253S/V308S/L309Q/H310V/Q311N/ |
| | L432Q/H433N/H435N |
| 219 | T250R/L251A/M252V/I253S/E258W/V259G/N434T/H435D/ |
| | Y436F/T437N |
| 220 | T250R/L251A/M252V/I253S/1253Y/S254H/R255Q |
| 221 | T250A/T307Y/V308D/H433R/N434F |
| 222 | T307Q/V308T/L309S/H433R/N434F |
| 223 | T256Q/P257Q/E258Y/V259R/H433R/N434F |
| 224 | T250H/L251E/M252Q/I253Q/H433R/N434F |
| 225 | L309T/H310P/Q311H/H433R/N434F |
| 226 | T250A/L251R/M252H/I253T/H433R/N434F |
| 227 | T250V/L251Y/M252Q/H433R/N434F |
| 228 | T250K/L251C/M252Q/I253N/H433R/N434F |
| 229 | I253Y/S254H/R255Q/H433R/N434F |
| 230 | L251V/M252F/I253P/H433R/N434F |
| 231 | T250A/T307Y/V308D/H433P/N434Y |
| 232 | T307Q/V308T/L309S/H433P/N434Y |
| 233 | T256Q/P257Q/E258Y/V259R/H433P/N434Y |
| 234 | T250H/L251E/M252Q/I253Q/H433P/N434Y |
| 235 | L309T/H310P/Q311H/H433P/N434Y |
| 236 | T250A/L251R/M252H/I253T/H433P/N434Y |
| 237 | T250V/L251Y/M252Q/H433P/N434Y |
| 238 | T250K/L251C/M252Q/I253N/H433P/N434Y |
| 239 | I253Y/S254H/R255Q/H433P/N434Y |
| 240 | L251V/M252F/I253P/H433P/N434Y |
| 241 | T250A/T307Y/V308D/L432A/H433S/N434F |
| 242 | T307Q/V308T/L309S/L432A/H433S/N434F |
| 243 | T256Q/P257Q/E258Y/V259R/L432A/H433S/N434F |
| 244 | T250H/L251E/M252Q/I253Q/L432A/H433S/N434F |
| 245 | L309T/H310P/Q311H/L432A/H433S/N434F |
| 246 | T250A/L251R/M252H/I253T/L432A/H433S/N434F |
| 247 | T250V/L251Y/M252Q/L432A/H433S/N434F |
| 248 | T250K/L251C/M252Q/I253N/L432A/H433S/N434F |
| 249 | I253Y/S254H/R255Q/L432A/H433S/N434F |
| 250 | L251V/M252F/I253P/L432A/H433S/N434F |
| 251 | T250A/T307Y/V308D/H433P/N434W |
| 252 | T307Q/V308T/L309S/H433P/N434W |
| 253 | T256Q/P257Q/E258Y/V259R/H433P/N434W |
| 254 | T250H/L251E/M252Q/I253Q/H433P/N434W |
| 255 | L309T/H310P/Q311H/H433P/N434W |
| 256 | T250A/L251R/M252H/I253T/H433P/N434W |
| 257 | T250V/L251Y/M252Q/H433P/N434W |
| 258 | T250K/L251C/M252Q/I253N/H433P/N434W |
| 259 | I253Y/S254H/R255Q/H433P/N434W |
| 260 | L251V/M252F/I253P/H433P/N434W |
| 261 | T250A/T307Y/V308D/L432M/H433P/N434F |
| 262 | T307Q/V308T/L309S/L432M/H433P/N434F |
| 263 | T256Q/P257Q/E258Y/V259R/L432M/H433P/N434F |
| 264 | T250H/L251E/M252Q/I253Q/L432M/H433P/N434F |
| 265 | L309T/H310P/Q311H/L432M/H433P/N434F |
| 266 | T250A/L251R/M252H/I253T/L432M/H433P/N434F |
| 267 | T250V/L251Y/M252Q/L432M/H433P/N434F |
| 268 | T250K/L251C/M252Q/I253N/L432M/H433P/N434F |
| 269 | I253Y/S254H/R255Q/L432M/H433P/N434F |
| 270 | L251V/M252F/I253P/L432M/H433P/N434F |
| 271 | T250A/T307Y/V308D/L432A/H433K/N434F |
| 272 | T307Q/V308T/L309S/L432A/H433K/N434F |
| 273 | T256Q/P257Q/E258Y/V259R/L432A/H433K/N434F |
| 274 | T250H/L251E/M252Q/I253Q/L432A/H433K/N434F |
| 275 | L309T/H310P/Q311H/L432A/H433K/N434F |
| 276 | T250A/L251R/M252H/I253T/L432A/H433K/N434F |
| 277 | T250V/L251Y/M252Q/L432A/H433K/N434F |
| 278 | T250K/L251C/M252Q/I253N/L432A/H433K/N434F |
| 279 | I253Y/S254H/R255Q/L432A/H433K/N434F |
| 280 | L251V/M252F/I253P/L432A/H433K/N434F |
| 281 | T250A/T256Q/P257Q/E258Y/V259R/T307Y/V308D |
| 282 | T250A/T307Y/V308D/L432M/H433P/N434I/H435P |
| 283 | T250A/T307Y/V308D/L432P/H433M/N434Q |
| 284 | T250A/E258W/V259G/T307Y/V308D/N434T/H435D/Y436F/ |
| | T437N |
| 285 | T250A/I253Y/S254H/R255Q/T307Y/V308D |
| 286 | T256Q/P257Q/E258Y/V259R/T307Q/V308T/L309S |
| 287 | T250H/L251E/M252Q/I253Q/T307Q/V308T/L309S |
| 288 | T307Q/V308T/L309S/L432M/H433P/N434I/H435P |
| 289 | T307Q/V308T/L309S/L432P/H433M/N434Q |
| 290 | T250A/L251Q/M252Y/I253R/T307Q/V308T/L309S/L432Y/ |
| | H433R/N434L/H435P |
| 291 | E258W/V259G/T307Q/V308T/L309S/N434T/H435D/Y436F/ |
| | T437N |
| 292 | T250A/L251R/M252H/I253T/T307Q/V308T/L309S |
| 293 | T250V/L251Y/M252Q/T307Q/V308T/L309S |
| 294 | T250K/L251C/M252Q/I253N/T307Q/V308T/L309S |
| 295 | I253Y/S254H/R255Q/T307Q/V308T/L309S |
| 296 | L251V/M252F/I253P/T307Q/V308T/L309S |
| 297 | T250H/L251E/M252Q/I253Q/T256Q/P257Q/E258Y/V259R |
| 298 | T256Q/P257Q/E258Y/V259R/L309T/H310P/Q311H |
| 299 | T256Q/P257Q/E258Y/V259R/L432M/H433P/N434I/H435P |
| 300 | T256Q/P257Q/E258Y/V259R/L432P/H433M/N434Q |
| 301 | T256Q/P257Q/E258Y/V259R/V308S/L309Q/H310V/Q311N/ |
| | L432Q/H433N/H435N |
| 302 | T250A/L251Q/M252Y/I253R/T256Q/P257Q/E258Y/V259R/ |
| | L432Y/H433R/N434L/H435P |
| 303 | T250A/L251R/M252H/I253T/T256Q/P257Q/E258Y/V259R |
| 304 | T250V/L251Y/M252Q/T256Q/P257Q/E258Y/V259R |
| 305 | T250K/L251C/M252Q/I253N/T256Q/P257Q/E258Y/V259R |
| 306 | L251V/M252F/I253P/T256Q/P257Q/E258Y/V259R |
| 307 | T250H/L251E/M252Q/I253Q/L309T/H310P/Q311H |
| 308 | T250H/L251E/M252Q/I253Q/L432M/H433P/N434I/H435P |
| 309 | T250H/L251E/M252Q/I253Q/L432P/H433M/N434Q |
| 310 | T250H/L251E/M252Q/I253Q/V308S/L309Q/H310V/Q311N/ |
| | L432Q/H433N/H435N |
| 311 | T250H/L251E/M252Q/I253Q/E258W/V259G/N434T/H435D/ |
| | Y436F/T437N |
| 312 | T250H/L251E/M252Q/I253Q/T307Q/V308T/L309S |
| 313 | T250H/L251E/M252Q/I253Q/1253Y/S254H/R255Q |
| 314 | L309T/H310P/Q311H/L432M/H433P/N434I/H435P |
| 315 | L309T/H310P/Q311H/L432P/H433M/N434Q |
| 316 | T250A/L251Q/M252Y/I253R/L309T/H310P/Q311H/L432Y/ |
| | H433R/N434L/H435P |
| 317 | E258W/V259G/L309T/H310P/Q311H/N434T/H435D/Y436F/ |
| | T437N |
| 318 | T250A/L251R/M252H/I253T/L309T/H310P/Q311H |
| 319 | T250V/L251Y/M252Q/L309T/H310P/Q311H |
| 320 | T256Q/P257Q/E258Y/V259R/L309T/H310P/Q311H |
| 321 | T250K/L251C/M252Q/I253N/L309T/H310P/Q311H |
| 322 | I253Y/S254H/R255Q/L309T/H310P/Q311H |
| 323 | L251V/M252F/I253P/L309T/H310P/Q311H |
| 324 | T250A/L251R/M252H/I253T/L432M/H433P/N434I/H435P |
| 325 | T250V/L251Y/M252Q/L432M/H433P/N434I/H435P |
| 326 | T250K/L251C/M252Q/I253N/L432M/H433P/N434I/H435P |
| 327 | I253Y/S254H/R255Q/L432M/H433P/N434I/H435P |
| 328 | L251V/M252F/I253P/L432M/H433P/N434I/H435P |
| 329 | T250A/L251R/M252H/I253T/L432P/H433M/N434Q |
| 330 | T250V/L251Y/M252Q/L432P/H433M/N434Q |
| 331 | T250K/L251C/M252Q/I253N/L432P/H433M/N434Q |
| 332 | I253Y/S254H/R255Q/L432P/H433M/N434Q |
| 333 | L251V/M252F/I253P/L432P/H433M/N434Q |
| 334 | T250A/L251R/M252H/I253T/V308S/L309Q/H310V/Q311N/ |
| | L432Q/H433N/H435N |
| 335 | T250V/L251Y/M252Q/V308S/L309Q/H310V/Q311N/L432Q/ |
| | H433N/H435N |
| 336 | T250K/L251C/M252Q/I253N/V308S/L309Q/H310V/Q311N/ |
| | L432Q/H433N/H435N |
| 337 | I253Y/S254H/R255Q/V308S/L309Q/H310V/Q311N/L432Q/ |
| | H433N/H435N |
| 338 | L251V/M252F/I253P/V308S/L309Q/H310V/Q311N/L432Q/ |
| | H433N/H435N |
| 339 | T250A/L251Q/M252Y/I253R/I253Y/S254H/R255Q/L432Y/ |
| | H433R/N434L/H435P |
| 340 | T250A/L251R/M252H/I253T/E258W/V259G/N434T/H435D/ |
| | Y436F/T437N |
| 341 | T250V/L251Y/M252Q/E258W/V259G/N434T/H435D/Y436F/ |
| | T437N |
| 342 | T250K/L251C/M252Q/I253N/E258W/V259G/N434T/H435D/ |
| | Y436F/T437N |
| 343 | L251V/M252F/I253P/E258W/V259G/N434T/H435D/Y436F/ |
| | T437N |
| 344 | T250A/L251R/M252H/I253T/1253Y/S254H/R255Q |
| 345 | T250V/L251Y/M252Q/I253Y/S254H/R255Q |
| 346 | T250K/L251C/M252Q/I253N/I253Y/S254H/R255Q |
| 347 | L251V/M252F/I253P/1253Y/S254H/R255Q |

[0143] In a preferred embodiment, the combination of substituting amino acids at specific EU position in Fc variant according to the current invention is selected from the sequences as set forth in SEQ ID NO. 1, SEQ ID NO. 2, SEQ ID NO. 3, SEQ ID NO. 4, SEQ ID NO. 5, SEQ ID NO. 7, SEQ ID NO. 9, SEQ ID NO. 11, SEQ ID NO. 14, SEQ ID NO. 15, SEQ ID NO. 18, SEQ ID NO. 20, SEQ ID NO. 21, SEQ ID NO. 22, SEQ ID NO. 23, SEQ ID NO. 24, SEQ ID NO. 25, SEQ ID NO. 26, SEQ ID NO. 27, SEQ ID NO. 29, SEQ ID NO. 30, SEQ ID NO. 31, SEQ ID NO. 32, SEQ ID NO. 34, SEQ ID NO. 35, SEQ ID NO. 36, SEQ ID NO. 38, SEQ ID NO. 39, SEQ ID NO. 40, SEQ ID NO. 41, SEQ ID NO. 42, SEQ ID NO. 43, SEQ ID NO. 44, SEQ ID NO. 45, SEQ ID NO. 46, SEQ ID NO. 47, SEQ ID NO. 48, SEQ ID NO. 49, SEQ ID NO. 50, SEQ ID NO. 51, SEQ ID NO. 52, SEQ ID NO. 53, SEQ ID NO. 54, SEQ ID NO. 55, SEQ ID NO. 56, SEQ ID NO. 57, SEQ ID NO. 58, SEQ ID NO. 59, SEQ ID NO. 60, SEQ ID NO. 61, SEQ ID NO. 62, SEQ ID NO. 63, SEQ ID NO. 64, SEQ ID NO. 65, SEQ ID NO. 66, SEQ ID NO. 67, SEQ ID NO. 68, SEQ ID NO. 69, SEQ ID NO. 70, SEQ ID NO. 71, SEQ ID NO. 72, SEQ ID NO. 73, SEQ ID NO. 74, SEQ ID NO. 75, SEQ ID NO. 76, SEQ ID NO. 77, SEQ ID NO. 78, SEQ ID NO. 79, SEQ ID NO. 80, SEQ ID NO. 81, SEQ ID NO. 82, SEQ ID NO. 83, SEQ ID NO. 84, SEQ ID NO. 85, SEQ ID NO. 86, SEQ ID NO. 87, SEQ ID NO. 88, SEQ ID NO. 89, SEQ ID NO. 90, SEQ ID NO. 91, SEQ ID NO. 92, SEQ ID NO. 93, SEQ ID NO. 94, SEQ ID NO. 95, SEQ ID NO. 96, SEQ ID NO. 97, SEQ ID NO. 98, SEQ ID NO. 99, SEQ ID NO. 100, SEQ ID NO. 101, SEQ ID NO. 102, SEQ ID NO. 103, SEQ ID NO. 104, SEQ ID NO. 105, SEQ ID NO. 106, SEQ ID NO. 107, SEQ ID NO. 108, SEQ ID NO. 109, SEQ ID NO. 110, SEQ ID NO. 111, SEQ ID NO. 112, SEQ ID NO. 113, SEQ ID NO. 114, SEQ ID NO. 115, SEQ ID NO. 116, SEQ ID NO. 117, SEQ ID NO. 118, SEQ ID NO. 119, SEQ ID NO. 120, SEQ ID NO. 121, SEQ ID NO. 122, SEQ ID NO. 123, SEQ ID NO. 124, SEQ ID NO. 125, SEQ ID NO. 126, SEQ ID NO. 127, SEQ ID NO. 128, SEQ ID NO. 129, SEQ ID NO. 130, SEQ ID NO. 131, SEQ ID NO. 132, SEQ ID NO. 133, SEQ ID NO. 134, SEQ ID NO. 135, SEQ ID NO. 136, SEQ ID NO. 137, SEQ ID NO. 138, SEQ ID NO. 139, SEQ ID NO. 140, SEQ ID NO. 141, SEQ ID NO. 142, SEQ ID NO. 143, SEQ ID NO. 144, SEQ ID NO. 145, SEQ ID NO. 146, SEQ ID NO. 147, SEQ ID NO. 148, SEQ ID NO. 149, SEQ ID NO. 150, SEQ ID NO. 151, SEQ ID NO. 152, SEQ ID NO. 153, SEQ ID NO. 154, SEQ ID NO. 155, SEQ ID NO. 156, SEQ ID NO. 157, SEQ ID NO. 158, SEQ ID NO. 159, SEQ ID NO. 160, SEQ ID NO. 161, SEQ ID NO. 162, SEQ ID NO. 163, SEQ ID NO. 164, SEQ ID NO. 165, SEQ ID NO. 166, SEQ ID NO. 167, SEQ ID NO. 168, SEQ ID NO. 169, SEQ ID NO. 170, SEQ ID NO. 171, SEQ ID NO. 172, SEQ ID NO. 173, SEQ ID NO. 174, SEQ ID NO. 175, SEQ ID NO. 176, SEQ ID NO. 177, SEQ ID NO. 178, SEQ ID NO. 179, SEQ ID NO. 180, SEQ ID NO. 181, SEQ ID NO. 182, SEQ ID NO. 183, SEQ ID NO. 184, SEQ ID NO. 185, SEQ ID NO. 186, SEQ ID NO. 187, SEQ ID NO. 188, SEQ ID NO. 189, SEQ ID NO. 190, SEQ ID NO. 191, SEQ ID NO. 192, SEQ ID NO. 193, SEQ ID NO. 194, SEQ ID NO. 195, SEQ ID NO. 196, SEQ ID NO. 197, SEQ ID NO. 198, SEQ ID NO. 199, SEQ ID NO. 200, SEQ ID NO. 201, SEQ ID NO. 202, SEQ ID NO. 203, SEQ ID NO. 204, SEQ ID NO. 205, SEQ ID NO. 206, SEQ ID NO. 207, SEQ ID NO. 208, SEQ ID NO. 209, SEQ ID NO. 210, SEQ ID NO. 211, SEQ ID NO. 212, SEQ ID NO. 213, SEQ ID NO. 214, SEQ ID NO. 215, SEQ ID NO. 216, SEQ ID NO. 217, SEQ ID NO. 218, SEQ ID NO. 219, SEQ ID NO. 220, SEQ ID NO. 221, SEQ ID NO. 222, SEQ ID NO. 223, SEQ ID NO. 224, SEQ ID NO. 225, SEQ ID NO. 226, SEQ ID NO. 227, SEQ ID NO. 228, SEQ ID NO. 229, SEQ ID NO. 230, SEQ ID NO. 231, SEQ ID NO. 232, SEQ ID NO. 233, SEQ ID NO. 234, SEQ ID NO. 235, SEQ ID NO. 236, SEQ ID NO. 237, SEQ ID NO. 238, SEQ ID NO. 239, SEQ ID NO. 240, SEQ ID NO. 241, SEQ ID NO. 242, SEQ ID NO. 243, SEQ ID NO. 244, SEQ ID NO. 245, SEQ ID NO. 246, SEQ ID NO. 247, SEQ ID NO. 248, SEQ ID NO. 249, SEQ ID NO. 250, SEQ ID NO. 251, SEQ ID NO. 252, SEQ ID NO. 253, SEQ ID NO. 254, SEQ ID NO. 255, SEQ ID NO. 256, SEQ ID NO. 257, SEQ ID NO. 258, SEQ ID NO. 259, SEQ ID NO. 260, SEQ ID NO. 261, SEQ ID NO. 262, SEQ ID NO. 263, SEQ ID NO. 264, SEQ ID NO. 265, SEQ ID NO. 266, SEQ ID NO. 267, SEQ ID NO. 268, SEQ ID NO. 269, SEQ ID NO. 270, SEQ ID NO. 271, SEQ ID NO. 272, SEQ ID NO. 273, SEQ ID NO. 274, SEQ ID NO. 275, SEQ ID NO. 276, SEQ ID NO. 277, SEQ ID NO. 278, SEQ ID NO. 279, SEQ ID NO. 280, SEQ ID NO. 281, SEQ ID NO. 282, SEQ ID NO. 283, SEQ ID NO. 284, SEQ ID NO. 285, SEQ ID NO. 286, SEQ ID NO. 287, SEQ ID NO. 288, SEQ ID NO. 289, SEQ ID NO. 290, SEQ ID NO. 291, SEQ ID NO. 292, SEQ ID NO. 293, SEQ ID NO. 294, SEQ ID NO. 295, SEQ ID NO. 296, SEQ ID NO. 297, SEQ ID NO. 298, SEQ ID NO. 299, SEQ ID NO. 300, SEQ ID NO. 301, SEQ ID NO. 302, SEQ ID NO. 303, SEQ ID NO. 304, SEQ ID NO. 305, SEQ ID NO. 306, SEQ ID NO. 307, SEQ ID NO. 308, SEQ ID NO. 309, SEQ ID NO. 310, SEQ ID NO. 311, SEQ ID NO. 312, SEQ ID NO. 313, SEQ ID NO. 314, SEQ ID NO. 315, SEQ ID NO. 316, SEQ ID NO. 317, SEQ ID NO. 318, SEQ ID NO. 319, SEQ ID NO. 320, SEQ ID NO. 321, SEQ ID NO. 322, SEQ ID NO. 323, SEQ ID NO. 324, SEQ ID NO. 325, SEQ ID NO. 326, SEQ ID NO. 327, SEQ ID NO. 328, SEQ ID NO. 329, SEQ ID NO. 330, SEQ ID NO. 331, SEQ ID NO. 332, SEQ ID NO. 333, SEQ ID NO. 334, SEQ ID NO. 335, SEQ ID NO. 336, SEQ ID NO. 337, SEQ ID NO. 338, SEQ ID NO. 339, SEQ ID NO. 340, SEQ ID NO. 341, SEQ ID NO. 342, SEQ ID NO. 343, SEQ ID NO. 344, SEQ ID NO. 345, SEQ ID NO. 346 and SEQ ID NO. 347.

[0144] In one of the preferred embodiment, the combination of substituting amino acids at specific EU position in Fc variant according to the current invention is selected from the sequences as set forth in SEQ ID NO. 1, SEQ ID NO. 2, SEQ ID NO. 3, SEQ ID NO. 4, SEQ ID NO. 5, SEQ ID NO. 7, SEQ ID NO. 9, SEQ ID NO. 11, SEQ ID NO. 14, SEQ ID NO. 15, SEQ ID NO. 18, SEQ ID NO. 20, SEQ ID NO. 21, SEQ ID NO. 22, SEQ ID NO. 23, SEQ ID NO. 24, SEQ ID NO. 25, SEQ ID NO. 26, SEQ ID NO. 27, SEQ ID NO. 29, SEQ ID NO. 30, SEQ ID NO. 31, SEQ ID NO. 32, SEQ ID NO. 34, SEQ ID NO. 35, SEQ ID NO. 36, SEQ ID NO. 38, SEQ ID NO. 39, SEQ ID NO. 40, SEQ ID NO. 41, SEQ ID NO. 42, SEQ ID NO. 43, SEQ ID NO. 44, SEQ ID NO. 45, SEQ ID NO. 46, SEQ ID NO. 47, SEQ ID NO. 48 and SEQ ID NO. 49.

[0145] In one of the preferred embodiments, the combination of substituting amino acids at specific EU position in Fc variant according to the current invention is as set forth in SEQ ID NO. 3, SEQ ID NO. 5, SEQ ID NO. 10, SEQ ID NO. 20 or SEQ ID NO. 22.

[0146] In a more preferred embodiment, the amino acid sequence of Fc variant of the current invention is selected from SEQ ID NO. 22a, SEQ ID NO. 22b, SEQ ID NO. 22c, SEQ ID NO. 22d, SEQ ID NO. 22e and SEQ ID NO. 22f and SEQ ID NO. 22g.

[0147] The residues of Fc variant, their respective amino acid substitution and combinations of amino acid substitutions of specific residues, as described herein can be present in Fc protein of IgG₁, IgG₂, IgG₃, IgG₄ or IgG₂/G₄ isotype, preferably the IgG₁ isotype. Fc variant construct(s) of IgG2, IgG4 or IgG₂/G₄ isotype may contain single amino acid substitution (i.e., S228P) in the hinge region of Fc variant to reduce the disruption of disulphide bond between two Fc chains. (8) The Fc variant prepared according to the current invention may optionally be modified to modify functionality, e.g., to eliminate residual effector functions such as ADCC and CDC activity. Preferably, the Fc variant of the current invention has no CDC activity. Preferably, the Fc variants of the current invention has reduced ADCC activity as compared to ADCC activity of wild-type Fc or ADCC activity of IVIg. The Fc variant according to the current invention has altered (increased or decreased) affinity for an Fc receptor relative to the affinity of a wild-type IgG₁ Fc region for the said Fc gamma receptor. In one of the embodiments, the Fc variant has increased affinity for FcγRIIIa (CD16a), FcγRIIa (CD32a) and FcγRI (CD64) relative to the affinity of a wild-type IgG₁ Fc region for said FcγRIIIa (CD16a), FcγRIIa (CD32a) and FcγRI (CD64). In one of the embodiments, the Fc variant of the present invention has a K_{D} of 10⁻⁷ M or less for FcγRIIIa (CD16a), including allotypes V158 and F158. K_{D} value is a measurement of the binding affinity of the antibody towards its target antigen. In one of the embodiments, the Fc variant of the present invention inhibits immune complex mediated FcγR activation as assessed by inhibition of ADCC. In one of the embodiments, the Fc variant of the present invention inhibits phagocytosis mediated by FcγRs. In one of the embodiments, the Fc variant of the present invention inhibits cytokine release such as IL-6 or IL-8 mediated by FcγRs. Current invention provides Fc variant which can bind to FcRn as well as FcγRs with high affinity. Thus, Fc variant of the present invention has the combined effects of the multiple mechanisms of action of a single drug, such as FcRn blockade and inhibition of FcγR activation and thus it results into robust efficacy of the Fc variant of the current invention.

[0148] The combined effects has been illustrated herein examples with one of the non-limiting Fc variants of the current invention. The said Fc variant has substitutions of SEQ ID No. 22 as described in table 3. Amino acid sequence of non-limiting Fc variant of the current invention is as provided in below table 4. A particular variant SEQ ID NO. 22b of SEQ ID NO.22 was used in different experiments given herein examples.

TABLE 4
Amino acid sequence of Fc variant-SEQ ID NO. 22

| SEQ ID | |
|---|---|
| No. | Amino acid sequence |
| 22a | ASTKGPSVFPLAPSSKSTSGGTAALGCLVKDYFPEPVTVSWNSGALTSGVHTFPAVLQ |
| | SSGLYSLSSVVTVPSSSLGTQTYICNVNHKPSNTKVDKKVEPKSCDKTHTCPPCPAPE |
| | LLGGPSVFLFPPKPKDTLMISRTPEVTCVVVDVSHEDPEVKFNWYVDGVEVHNAKTKP |
| | REEQYNSTYRVVSVLNPYHQDWLNGKEYKCKVSNKALPAPIEKTISKAKGQPREPQVY |
| | TLPPSRDELTKNQVSLTCLVKGFYPSDIAVEWESNGQPENNYKTTPPVLDSDGSFFLY |
| | SKLTVDKSRWQQGNVFSCSVMHEALRWHYTQKSLSLSPGK |
| 22b | DKTHTCPPCPAPELLGGPSVFLFPPKPKDTLMISRTPEVTCVVVDVSHEDPEVKFNWY |
| | VDGVEVHNAKTKPREEQYNSTYRVVSVLNPYHQDWLNGKEYKCKVSNKALPAPIEKTI |
| | SKAKGQPREPQVYTLPPSRDELTKNQVSLTCLVKGFYPSDIAVEWESNGQPENNYKTT |
| | PPVLDSDGSFFLYSKLTVDKSRWQQGNVFSCSVMHEALRWHYTQKSLSLSPGK |
| 22c | CPPCPAPELLGGPSVFLFPPKPKDTLMISRTPEVTCVVVDVSHEDPEVKFNWYVDGVE |
| | VHNAKTKPREEQYNSTYRVVSVLNPYHQDWLNGKEYKCKVSNKALPAPIEKTISKAKG |
| | QPREPQVYTLPPSRDELTKNQVSLTCLVKGFYPSDIAVEWESNGQPENNYKTTPPVLD |
| | SDGSFFLYSKLTVDKSRWQQGNVFSCSVMHEALRWHYTQKSLSLSPGK |
| 22d | DKTHTCPPCPAPELLGGPSVFLFPPKPKDTLMISRTPEVTCVVVDVSHEDPEVKFNWY |
| | VDGVEVHNAKTKPREEQYNSTYRVVSVLNPYHQDWLNGKEYKCKVSNKALPAPIEKTI |
| | SKAKGQPREPQVYTLPPSRDELTKNQVSLTCLVKGFYPSDIAVEWESNGQPENNYKTT |
| | PPVLDSDGSFFLYSKLTVDKSRWQQGNVFSCSVMHEALRWHYTQKSLSLSPG |
| 22e | CPPCPAPELLGGPSVFLFPPKPKDTLMISRTPEVTCVVVDVSHEDPEVKFNWYVDGVE |
| | VHNAKTKPREEQYNSTYRVVSVLNPYHQDWLNGKEYKCKVSNKALPAPIEKTISKAKG |
| | QPREPQVYTLPPSRDELTKNQVSLTCLVKGFYPSDIAVEWESNGQPENNYKTTPPVLD |
| | SDGSFFLYSKLTVDKSRWQQGNVFSCSVMHEALRWHYTQKSLSLSPG |
| 22f | APELLGGPSVFLFPPKPKDTLMISRTPEVTCVVVDVSHEDPEVKFNWYVDGVEVHNAK |
| | TKPREEQYNSTYRVVSVLNPYHQDWLNGKEYKCKVSNKALPAPIEKTISKAKGQPREP |
| | QVYTLPPSRDELTKNQVSLTCLVKGFYPSDIAVEWESNGQPENNYKTTPPVLDSDGSF |
| | FLYSKLTVDKSRWQQGNVFSCSVMHEALRWHYTQKSLSLSPGK |
| 22g | APELLGGPSVFLFPPKPKDTLMISRTPEVTCVVVDVSHEDPEVKFNWYVDGVEVHNAK |
| | TKPREEQYNSTYRVVSVLNPYHQDWLNGKEYKCKVSNKALPAPIEKTISKAKGQPREP |
| | QVYTLPPSRDELTKNQVSLTCLVKGFYPSDIAVEWESNGQPENNYKTTPPVLDSDGSF |
| | FLYSKLTVDKSRWQQGNVFSCSVMHEALRWHYTQKSLSLSPG |

[0149] In one of the aspects, the Fc variant of the present invention may include non-natural amino acid(s) at one or more position. Introduction of non-natural amino acids in peptides are well known to the skilled person. Methods of making and introducing a non-naturally-occurring amino acid into a protein are known (U.S. Pat. Nos. 7,083,970; and 7,524,647). In one of the aspects, Fc variant according to the present invention has increased FcRn binding and increased half-life with modified or reduced or no ADCC and/or CDC activity. The ADCC and/or CDC activity of the Fc variant of the current invention is compared with the said activity of wild-type Fc protein or IVIg. In one of the embodiments, the Fc variant according to the present invention has amino acid substitution selected from P329G and/or M428L & N434S mutation.

[0150] Preparation of Fc Variants

[0151] Fc variant of the present invention is prepared using phage display library approach after making mutant libraries using site directed mutagenesis approach as described herein examples.

[0152] Nucleic Acid Molecules Encoding Fc Variants, Vectors and Host Cells

[0153] In one embodiment, the present invention provides nucleic acid molecules encoding the Fc variant(s) or Fc variant containing protein(s) containing as well as expression vector(s) comprising such nucleic acids and host cell(s) comprising such nucleic acid molecules encoding Fc variant from the expression vectors. Suitable vectors to produce Fc variant(s) or Fc variant containing protein(s) of the current invention by recombinant method are known in the art for the person skilled in the art. Examples of such known vectors are described in patent documents WO 2007/017903, WO 2012/046255, which are incorporated herein. The host cell according to the present invention is prokaryotic or eukaryotic cell, preferably the host cell is a mammalian cell, more preferably CHO cell.

[0154] Pharmaceutical Compositions

[0155] A pharmaceutical composition, containing one or a combination of Fc variant(s) or Fc variant containing protein(s) or Fc variant containing molecule(s) of the present invention, formulated together with a pharmaceutically acceptable carrier can be developed. Such compositions may include one or a combination of (e.g., two or more different) Fc variant(s) or Fc variant containing protein(s), or immunoconjugate(s) or bispecific molecule(s) of the invention. For example, a pharmaceutical composition of the invention can comprise a combination of Fc variant(s) or Fc variant containing protein(s) and antibody (or immunoconjugate or bispecific) that binds to different epitopes on the target antigen.

[0156] Therapeutic Uses

[0157] The Fc variant(s) or Fc variant containing protein(s) or Fc variant containing molecule(s) can be used for the treatment of diseases involving therapeutic methods that require binding of the drug to the FcRn.

[0158] In one embodiment of the present invention, the Fc variant(s) or Fc variant containing protein(s) can be used to inhibit FcRn in vivo in subjects, including humans, suffering from disease such as, but not limited to, autoimmune disease and inflammations.

[0159] In certain embodiment, the Fc variant(s) or Fc variant containing protein(s) or Fc variant containing molecule(s) used to treat disease selected from Autoimmune hemolytic anemia, Pernicious anemia, Idiopathic thrombocytopenic purpura, Goodpasture's syndrome, Bullous pemphigoid, Pemphigous vulgaris, Hashimoto's thyroiditis, Insulin-dependent diabetes mellitus (IDDM), Graves disease, Myasthenia gravis, CIDP Diabetes, Antianemics (Beta-Thalassemia), Hematopoietic Agents, Ophthalmic Drugs, Bone Diseases, Neurological Genetic Disorders, Age-related macular degeneration, Diabetic Retinopathy, Macular diseases, Non-Small Cell Lung Cancer Therapy, Ocular Genetic Disorders, Hemophilia B, Agents for (Coagulation factor IX deficiency) Cardiovascular Diseases, Type 2 Diabetes, Immunosuppressants, Rheumatoid Arthritis, Treatment of Transplant Rejection, Brain Cancer, Breast Cancer, Colorectal Cancer, Diabetic Retinopathy, Digestive/Gastrointestinal Cancer, Endocrine Cancer, Female Reproductive System Cancer, Gastric Cancer, Genitourinary Cancer, Macular diseases, Melanoma, Multiple Myeloma, Myelodysplastic Syndrome Therapy, Myeloid Leukemia Therapy, Non-Hodgkin's Lymphoma Therapy, Non-Small Cell Lung Cancer, Ovarian Cancer, Pancreatic Cancer, Prostate Cancer Therapy, Renal Cancer Therapy, Retinopathy, Aplastic anemia, Analgesic Drugs, Hematologic Genetic Disorders, Multisystem Genetic Disorders, Osteoarthritis, Scleroderma, Treatment of Autoimmune Diseases, Treatment of Gout, Urticaria, Ankylosing Spondylitis, Asthma Therapy, Dermatologic Drugs, Idiopathic Inflammatory Myopathies, Immunosuppressants, Inflammatory Bowel Disease, Interstitial Lung Diseases, Multiple Myeloma Therapy, Multiple Sclerosis, Nephritis, Psoriatic Arthritis, Systemic Lupus Erythematosus, Agents for Acute Alcoholic Hepatitis, Alzheimer's Dementia, Antiallergy/Antiasthmatic Drugs, Antiarthritic Drugs, Antipsoriatics, Breast Cancer Therapy, Cancer Associated Disorders, Dermatologic Drugs, Heart Failure Therapy, Lymphoma Therapy, Nephritis, Neurologic Drugs (Miscellaneous), Respiratory Disorders, Therapy of Inborn Errors of Metabolism. Here, the present invention is illustrated with the following non-limiting examples which should not be interpreted as limiting the scope of the invention in any way.

### EXAMPLES

[0160] The following examples are put forth so as to provide those of ordinary skills in the art with a disclosure and description of how the methods and Fc variants claimed herein are performed. They are intended to purely exemplify only and are not intended to limit the scope of the disclosure. The other Fc variants of the present invention can be developed using method as described in provided examples with some modifications. Such modifications are known to the person skilled in the art.

### Example 1: Phage Display Library Preparation

[0161] (a) Wild Fc Plasmid Generation

[0162] For library generation, the human IgG₁ Fc region containing partial sequence of hinge with CH2 and CH3 domain of heavy chain (EU221-447) along with overhangs of EcoRI and BamHI was chemically synthesized and cloned in pMA/pMK vectors.

[0163] Fc gene (SEQ ID No. 348) was isolated from these construct after digestion with EcoRI and BamHI. An amino sequence of cloned Fc gene is provided herein as SEQ ID No.: 348.

| | | | | | |
|---|---|---|---|---|---|
| DKIHTCPPCP | APELLGGPSV | ELFPPKPKDT | LMISRTPEVT | CVVVDVSHED | 270 |
| PEVKFNWYVD | GVEVHNAKTK | PREEQYNSTY | RVVSVLTVLH | QDWLNGKEYK | 320 |
| CKVSNKALPA | PIEKTISKAK | GQPREPQVYT | LPPSRDELTK | NQVSLTCLVK | 370 |
| GFYPSDIAVE | WESNGQPENN | YKTTPPVLDS | DGSFFLYSKL | TVDKSRWQQG | 420 |
| NVFSCSVMHE | ALHNHYTOKS | LSLSPGK | | | 447 |

[0164] The pSEX81 (Cat No: PR3005, Progen) phagemid vector was modified in which pIII gene of phagemid vector was truncated and digested with EcoRI and BamHI and the linearized vector was ligated with the digested Fc gene. The resultant modified vector is referred herein as pSEX83. Vector map of pSEX83 is given herein as FIG. 1. The digested Fc and pSEX83 vector fragments were analyzed on agarose gel and purified from the gel using QIAquick gel extraction kit (Qiagen cat no 28706). The ligation products of both Fc (insert) and pSEX83 (vector) were transformed in electro-competent E. coli TG1 cells (Cat No: 60502-1, Lucigen). Transformed cells were plated on 2×YT agar plates containing ampicillin (100 μg/mL). The clones were analysed by EcoRI and BamHI restriction digestion and DNA sequencing using Sanger's method.

[0165] (b) Preparation of Secondary Libraries for Affinity Maturation

[0166] Two different strategies were followed to prepare Fc variant phage display library.

[0167] Strategy 1: PCR Primer Based Site Directed Mutagenesis

[0168] Four different regions in the CH2-CH3 (EU250-259, EU307-311, EU375-381 and EU432-437) domains of the Fc gene were targeted for introducing random mutations and preparing phage display library.

[0169] The mutations in the selected regions were introduced by using PCR with respective primer pairs (RK173/RK174, RK175/RK176, RK177/RK178, RK179/RK180, RK181/RK182 and RK183/RK184) having SapI restriction site (Table 4). Each primer pair was designed in such a way that they amplified a complete plasmid in a linear form which after restriction digestion by SapI followed by ligation with T4 DNA ligase resulted in a circular plasmid with mutations introduced by the primer pair. Each pair was used to make a separate library. Also DNA from one library was used to make libraries for adding mutations to other regions.

[0170] In brief, 100 ng of the template DNA of Fc gene in pSEX83 vector was used for amplification using the primer pairs mentioned in table 5. Once the template was amplified using the randomized primers the product was digested with SapI to obtain sticky ends. After PCR purification, the digested product was ligated overnight at 16° C. Ligated DNA was then transformed to freshly prepared electrocompetent cells (TG1). Transformed cells were cultured for the production of phages. The phage production was done separately for each library as explained earlier (Brockmann et al., 2011).

TABLE 5
list of primers used in PCR Primer based site
directed mutagenesis

| | |
|---|---|
| RK173 | ACTATCGTTAGCTCTTCTGATNNSNNSNNSNNSTCACGCACCC |
| | CTGAGGTTAC |
| RK174 | ACTATCGTTAGCTCTTCTATCTTTCGGCTTTGGCGGAAAAAGG |
| | AACACTGAAGG |
| RK175 | ACTATCGTTAGCTCTTCTATGNNSNNSNNSNNSCCTGAGGTTA |
| | CCTGCGTTGTTGTT |
| RK176 | ACTATCGTTAGCTCTTCTCATCAGTGTATCTTTCGGCTTTGGC |
| | GGAAAAAGGAA |
| RK177 | ACTATCGTTAGCTCTTCTTTANNSNNSNNSCATCAGGACTGGC |
| | TGAATGGAAAA |
| RK178 | ACTATCGTTAGCTCTTCTTAAGACTGATACCACGCGATAGGTG |
| | GAATTATATTG |
| RK179 | ACTATCGTTAGCTCTTCTCCGNNSNNSNNSNNSGTTGAATGGG |
| | AGTCCAATGGC |
| RK180 | ACTATCGTTAGCTCTTCTCGGGTAGAATCCCTTAACAAGGCAA |
| | GTCAATGA |
| RK181 | ACTATCGTTAGCTCTTCTATTNNSNNSNNSNNSGAGTCCAATG |
| | GCCAACCAGAGAAC |
| RK182 | ACTATCGTTAGCTCTTCTAATGTCTGACGGGTAGAATCCCTTA |
| | ACAAGGCAAGT |
| RK183 | ACTATCGTTAGCTCTTCTGCTNNSNNSNNSNNSTATACGCAGA |
| | AGAGTCTTAGTTTG |
| RK184 | ACTATCGTTAGCTCTTCTAGCCTCATGCATTACGGAGCATGAG |
| | AACACGTTCCC |

[0171] Strategy 2: Kunkel Mutagenesis and sRCA

[0172] Kunkel mutagenesis was performed with sRCA following reference 9. Small culture of CJ236 cells was infected with phages carrying plasmid of the Fc gene. The infected cells were grown in 2×YT containing uridine (6 μg/mL) and carbenicillin antibiotic (100 μg/mL). Phages were produced after superinfection with VCS M13 helper phage (Agilent technologies, USA) and purified by precipitating with PEG6000 (4%) and NaCl (500 mM). Single-stranded uridylated DNA (ss (U) DNA), was extracted from the purified phages by using M13 purification kit from E.Z.N.A.® M13 DNA mini kit (OMEGA bio-tek, USA) following the manufacturer's instructions.

[0173] This ss (U) DNA was used as a template in Kunkel mutagenesis and different primers with random mutations were used for making the library. Primers targeting different regions of Fc (Table 6) were hybridized separately to the ss (U) DNA template and extended by Kunkel mutagenesis method. The product was UDG-treated and selectively amplified by RCA (9). The RCA product was digested with Hind III, circularized using T4 DNA ligase and transformed in SS320 cells. Phages (the secondary library) were produced separately for each mutagenesis primer by superinfection with helper phage as described below.

TABLE 6
list of primers used in Kunkel mutagenesis

| | |
|---|---|
| RK114 | GGTAACCTCAGGGGTGCGTGASNNSNNSNNSNNATCTTTCGGC |
| | TTTGGCGGAAA |
| RK115 | AACAACGCAGGTAACCTCAGGSNNSNNSNNSNNCATCAGTGTA |
| | TCTTTCGGCTT |
| RK116 | GACATCAACAACAACGCAGGTSNNSNNSNNSNNGCGTGAAATC |
| | ATCAGTGTATC |
| RK117 | TCCATTCAGCCAGTCCTGATGSNNSNNSNNTAAGACTGATACC |
| | ACGCGATA |
| RK118 | CTCTTTTCCATTCAGCCAGTCSNNSNNSNNGACAGTTAAGACT |
| | GATACCAC |
| RK119 | CTCTTTTCCATTCAGCCAGTCSNNSNNSNNSNNSNNTAAGACT |
| | GATACCACGCGATA |
| RK120 | ATTGGACTCCCATTCAACCGCSNNSNNSNNCGGGTAGAATCCC |
| | TTAACAAG |
| RK121 | CTCTGGTTGGCCATTGGACTCSNNSNNSNNCGCAATGTCTGAC |
| | GGGTAGAA |
| RK122 | ATAGTGATTATGCAAAGCCTCSNNSNNSNNGGAGCATGAGAAC |
| | ACGTTCCC |
| RK123 | ACTAAGACTCTTCTGCGTATASNNSNNSNNSNNAGCCTCATGC |
| | ATTACGGAGCA |
| RK124 | CGACAAACTAAGACTCTTCTGSNNSNNSNNSNNATGCAAAGCC |
| | TCATGCATTAC |

### Example 2: Mutant Fc Phage Production from PCR and Kunkel Library and Purification Thereof

[0174] Flasks containing 2×YT media with carbenicillin or ampicillin (100 μL/mL) were inoculated with the cells from the glycerol stock of the above described library at the initial concentration of 0.06 OD₆₀₀. Cultures were grown at 37° C. with shaking at 250 rpm till they reach an OD₆₀₀ of up to ˜0.4-0.6. Helper phages either, VCSM13 (Agilent, Cat no. 200251) or M13KO7 (GE healthcare, Cat no. 27152401), were then added to the culture at a multiplicity of infection (MOI) of 20, and incubated first without shaking at 37° C. for 40 minutes, followed by another 40 minutes of incubation at 37° C. with shaking. Kanamycin was then added to the media and culture was grown overnight at 26° C. at 150 rpm. Overnight phage culture was centrifuged at 4000 g and cell pellet was discarded. PEG (20%)/NaCl (2.5 M) solution at a ratio of 1:5 was added to the supernatant in order to precipitate the phages. Resuspended solution was incubated on ice for 20 minutes followed by centrifugation at 14,000 g for 15 minutes at 4° C. Supernatant was discarded and pellet was resuspended in 1 mL of sterile PBS with 0.01% sodium azide. Phages were stored at 4° C. until further use.

### Example 3: Biopanning of High Affinity Fc Variants Expressing Phages

[0175] Fc mutant library (1×10¹² PFU) prepared in example 2 was screened for high affinity Fc binders to FcRn receptor. First round of panning against FcRn/FcGRT antigen (Sino biological, Cat No, CT071-H27H) at pH 6.0, was performed using antigen-immobilized, Immunotubes (Quidel, USA) that were prepared by incubating them with a 5 μg/mL FcRn protein solution in carbonate buffer (0.1 M, pH 9.6) overnight at 4° C. Immunotubes were washed 3 times with PBS and then incubated with phages in PBS for 2 h at 25° C. with constant rotation. The tubes were washed ten times with 4 mL PBS with tween 20 (0.1%) and subsequently 10 times with PBS. The bound phages were eluted with glycine-HCL pH 2.1 (0.1 M). The eluted phages were rescued by infection of TG1 E. coli cells, plated, and phages produced as described in example 3.

[0176] Second and third round of panning were performed on the FcRn antigen coated immunotubes in such a manner that output phages from first round of panning (1×10¹¹ CFU) and second (1×10¹⁰ CFU) round of panning were used, as input phages for second and third round of panning, respectively. Phages after third round of panning were infected in TG1 cells as mentioned before and phagemid DNA was isolated for Fc variant cloning in suitable expression vector.

### Example 4: Screening of Individual Fc Mutant Clones as Soluble Fc Proteins

[0177] Cloning to Expression Vector and Protein Production

[0178] The Fc variant genes from the enriched library produced after 3 rounds of panning were cloned into the expression vector pOPE101 (carbenicillin resistant) (Progen, Germany) or its modified version pOPE102 (kanamycin resistant) such that the individual Fc mutant clones could be produced as HIS-tagged fusion products. Both the vector DNA (pOPE101 or pOPE102) and phagemid DNA were digested with restriction enzymes (EcoRI and BamHI) to isolate vector and Fc variant genes, respectively. Both restriction digested vector and Fc gene were ligated and transformed to TG1 electrocompetent cells. Transformed cells were plated on to the 2×YT agar plates containing carbenicillin antibiotic. Individual clones were picked from the 2×YT agar plates and cultured in 15 mL tube with 5 mL of 2×YT media containing carbenicillin or ampicillin (100 μL/mL) overnight at 32° C. at 200 rpm. Next day, cultures were reinoculated to fresh 2×YT medium containing carbenicillin (100 μg/mL) and glucose (0.1%) at a volumetric ratio of 1:200. Cultures were grown until the OD₆₀₀ reached ˜0.6-0.8. After that 1 mM Isopropyl β-D-1-thiogalactopyranoside (IPTG) was added to the culture and grown overnight at 30° C. at 200 rpm. Overnight culture was spun at 10,800 g for 15 minutes and supernatant was removed. Cell pellet was resuspended in 1/20^{th} volume of the original culture in 1×PBS buffer pH-7.4 containing 2 mg/mL lysozyme, 0.1% triton X and 1 U/100 mL benzonase and incubated at 37° C. for 1 h. Resuspended pellet was centrifuged at 10,800 g for 15 minutes and supernatant was collected as the cell lysate containing the soluble His-tagged Fc variants. This cell lysate fraction was used in immunoassays to study FcRn-binding after quantifying the soluble Fc in the periplasmic fraction.

[0179] Quantification of Soluble Fc in Periplasmic Fraction

[0180] Clones were cultured individually for the production of soluble Fc variants as described above. Total Fc in cell lysate or periplasmic fraction was quantified by immobilizing the soluble Fc on maxisorp plates pre-coated with mouse anti-Human IgG antibody (Sigma, Cat no. 16760). Coating was done overnight with the mouse anti-Human IgG antibody at concentrations of 2.5 μg/mL (100 μL/well) in coating buffer (0.1 M NaHCO₃, pH 9.6). After washing the plate twice, cell lysate 100 μL ( 1/20 v/v in 1×PBS) was added and incubated for 1 h at 25° C. Known concentrations of serially diluted wild Fc IgG1 were used as standards for the calculation of amount of Fc protein in cell lysate. The plate was washed 3 time with PBST (0.1% Tween 20 in 1×PBS). 100 μL (1:10000) of HRP conjugated goat anti-human IgG Fc, F(ab)′2 Fragment (Invitrogen, cat no. A24476) was added to each well of the plate and incubated for 1 h. Plate was then washed 5 times with PBST followed by addition of substrate o-phenylenediamine dihydrochloride (OPD) (100 μL/well) for 15 minutes at 37° C. The reaction was stopped using 1N H₂SO₄ (100 ul/well) and optical density (OD) was measured at 450 nm using TECAN INFINITE® M1000pro. Concentration of Fc in cell lysate was then calculated using reference standards.

[0181] Qualitative Analysis of Fc Variants

[0182] FcRn antigen was coated on polystyrene plate (100 ng/100 μL/well), overnight at 4° C. in coating buffer (0.1 M NaHCO₃, pH 9.6). After washing the plate twice, 100 ng of Fc variant diluted in 100 μL PBS pH 6.0 was added to each well and incubated for 1 h at 25° C. Plates were washed 4 times with PBST (0.1% Tween 20 in 1×PBS pH 6.0) followed by addition of 100 μL (1:10000) of HRP conjugated goat anti-human IgG Fc, F(ab)′2 Fragment (Invitrogen, cat no. A24476) and incubated for 1 h at 25° C. Plate was then washed 5 times with PBST followed by addition of substrate o-phenylenediamine dihydrochloride (OPD) (100 μL/well) for 15 minutes at 37° C. The reaction was stopped using 1N H₂SO₄ (100 μL/well) and optical density was measured at 450 nm using TECAN INFINITE® M1000pro. Individual clones with relatively high OD signal compared to the wild Fc was shortlisted for further characterization.

### Example 5: Determination of Kinetic Rate Constants of Fc Variants Binding to Recombinant Human Neonatal Fc Receptor (rhFcRn)

[0183] The kinetic constants for the binding of Fc variants to recombinant human neonatal Fc receptor (rhFcRn) were determined by Surface Plasmon Resonance-based measurement using the ProteOn™ XPR36 (Bio-Rad). The rhFcRn receptor (Sino Biologics) was immobilized on a GLC chip following manufacturer's instruction. 10 mM phosphate buffer saline (PBS) (10 mM phosphate buffer, pH 6.0, 150 mM NaCl, with 0.005% Tweet 20) was used as running buffer to carry out the kinetic measurements. To measure the association rate constant (Kₐ) and dissociation rate constant (K_{d}), five dilutions of Fc variants were prepared in above mentioned running buffer and injected at a flow rate of 100 μL/min with an association time of 180 s and dissociation time of 600 s. Reactions were carried in PBS (pH 6.0, 0.005% surfactant P20) at 25° C. After each sample run, the chip surface was regenerated using two pulses of PBS (0.005% surfactant P20), pH 7.4, followed by one pulse of glycine buffer pH 1.5. The data, in the form of sensograms, was analysed using the data-fitting programs in the ProteOn™ system. The kinetic constants of rhFcRn binding to different Fc variants are shown in table 7.

TABLE 7
Kinetic constants for selected FcRn binders

| SEQ ID No. | Sample code | Kₐ | K_{d} | K_{D} |
|---|---|---|---|---|
| 3 | A4 | 1.12E+06 | 1.98E−02 | 1.08E−08 |
| 5 | D9-6 | 3.42E+05 | 2.93E−03 | 8.60E−09 |
| 6 | H11_4-2 | 1.06E+06 | 1.07E−02 | 1.02E−08 |
| 10 | B9-10 | 5.26E+06 | 1.56E−02 | 2.98E−09 |
| 19 | A9-10 | 4.21E+06 | 1.17E−02 | 2.79E−09 |
| 20 | F3-9 | 7.27E+06 | 2.64E−02 | 3.63E−09 |
| 22 | H11 + A4 | 7.51E+06 | 2.16E−03 | 2.88E−10 |

### Example 6: Determination of Kinetic Rate Constants of Fc Variants Binding to Recombinant Human Neonatal Fc Receptor (rhFcRn) at Different pH Condition

[0184] In this experiment, affinity constants for the binding of Fc variants to recombinant human neonatal Fc receptor (rhFcRn) were determined by Surface Plasmon Resonance-based measurement using the ProteOn™ XPR36 (Bio-Rad) at two different conditions. 10 mM phosphate buffered saline (PBS) (10 mM phosphate buffer, 150 mM NaCl, with 0.005% Tween 20) was used as the running buffer to carry out the kinetic measurements. To measure the affinity constant, five dilutions of Fc variants were prepared and injected at a flow rate of 100 μL/min with an association time of 180 s and dissociation time of 600 s. All the reactions were carried at 25° C. Samples were analyzed for FcRn binding in different pH conditions to check the effect of pH on FcRn binding and dissociation of molecule from FcRn. Affinity constants for Fc variant having sequence as set forth in SEQ ID No. 22 (H11+A4) to rhFcRn was measured. The buffer for association phase of interaction is the sample dilution buffer and buffer for dissociation phase of interaction is the running buffer. In condition 1, buffer for association phase was PBST pH 6.0, while buffer for dissociation phase was PBST pH 7.4. In condition 2, buffer for association phase was PBST pH 7.4, while buffer for dissociation phase was PBST pH 6.0 Fc variants used to conduct this experiment was produced in CHO cell line. The affinity constants of rhFcRn binding to Fc variant at two different pH conditions are shown in table 8.

TABLE 8
Affinity constant of FcRn binder at two different pH conditions

| SEQ ID | | | |
|---|---|---|---|
| No. | Sample code | Condition | K_{D} |
| 22 | H11 + A4 | Condition 1 | 4.98E−09 |
| | | (Association in PBST pH 6.0, | |
| | | Dissociation in PBST pH 7.4) | |
| 22 | H11 + A4 | Condition 2 | 8.44E−08 |
| | | (Association in PBST pH 7.4, | |
| | | Dissociation in PBST pH 6.0) | |

[0185] As it can be seen from table 8, Fc variant of the current invention can block FcRn with higher affinity at pH 6.0 as compared to at pH 7.4. Thus, the Fc variant of the current invention has retention of pH dependence (higher affinity at pH 6.0 than at near-neutral pH) characteristic of FcRn interactions. Therefore, Fc variant prepared according to the current invention can reduce total serum IgG levels in the circulation.

### Example 7: Determination of Kinetic Rate Constants of Fc Variants Binding to Recombinant Neonatal Fc Receptor (rFcRn) of Different Species

[0186] In this experiment, binding of the Fc variant of the current invention to FcRn of different species was determined by surface plasmon resonance-based measurement using the ProteOn™ XPR36 (Bio-Rad). To check kinetic rate constants, the experiment was conducted using recombinant FcRn of mouse, monkey and human with Fc variants having sequence as set forth in SEQ ID No. 22 (H11+A4). Fc variant used to conduct this experiment was produced using CHO cell as an expression system. FcRn (of different species) was immobilized on a GLC sensor chip surface using a standard amine coupling chemistry, and essentially, following the manufacturers' instruction. 10 mM phosphate buffered saline (PBS) (10 mM phosphate buffer, pH 6.0, 150 mM NaCl, 0.005% Tween 20) was used as the running buffer to carry out the kinetic measurements. To measure the association rate constant (k_{assoc}) and dissociation rate constant (k_{dissoc}), five dilutions of Fc muteins were prepared in above mentioned running buffer and injected at a flow rate of 100 μL/min with an association time of 180 s and dissociation time of 600 s. All the reactions were carried at 25° C. After each sample run, the chip surface was regenerated using PBST, pH 7.4. The data, in the form of sensorgrams, was analyzed using the data-fitting programs in the ProteOn™ system.

[0187] The kinetic constants of FcRn (of different species) binding to Fc variant are shown in table 9.

TABLE 9
Kinetic constant of FcRn binder for FcRn of different species

| Type of FcRn | Kₐ | K_{d} | K_{D} |
|---|---|---|---|
| Human FcRn | 4.10E+06 | 3.24E−03 | 7.91E−10 |
| Mouse FcRn | 1.18E+06 | 7.24E−04 | 6.15E−10 |
| Monkey FcRn | 4.42E+06 | 3.54E−03 | 8.01E−10 |

[0188] As it can be seen from table 9, Fc variant of the current invention can block not only human FcRn, but also mouse FcRn as well as monkey FcRn in-vitro. The advantageous characteristics of cross-reactivity with monkey FcRn means that the Fc variant of the current invention can be tested in non-human primates and the resulting data can be very useful in predicting their pharmacokinetics, pharmacodynamics and toxicity of the Fc variant of the current invention in humans.

### Example 8: Determination of Kinetic Rate Constants is of Fc Variants Binding to Fc Gamma Receptors

[0189] In this experiment, the kinetic constants for the binding of Fc variant to recombinant Fc gamma receptors were determined by Surface Plasmon Resonance-based measurement using the ProteOn™ XTR36 (Bio-Rad). For this experiment, FcγRIIIa (Phe) and FcγRIIIa (Val) Fcγ receptors were analysed for binding to Fc variant of the current invention having sequence as set forth in SEQ ID No. 22(H11+A4). All the recombinant human Fc receptors were directly immobilized on a GLC sensor chip surface using a standard amine coupling chemistry, and essentially, following the manufacturers' instruction. 10 mM phosphate buffered saline (PBS) (10 mM phosphate buffer, pH 7.4, 150 mM NaCl, with 0.005% Tween 20) was used as the running buffer to carry out the kinetic measurements for all the Fc receptor. To measure the association rate constant (k_{assoc}) and dissociation rate constant (k_{dissoc}), five dilutions of Fc variants were prepared in above mentioned running buffer and injected at a flow rate of 50 μL/min. Association time and dissociation time at each interaction is mentioned in table below. All the reactions were performed at 25° C. The data, in the form of sensorgrams, were analyzed using the data-fitting programs available with the ProteOn™ system.

TABLE 10
Experiment details for Fc receptors binding Fc variants

| Receptor | Association time (s) | Dissociation time (s) |
|---|---|---|
| FcγRIIIa (Phe) | 240 | 600 |
| FcγRIIIa (Val) | 240 | 600 |

[0190] The Fc variant used to conduct this experiment was produced in CHO cell line. Control molecule representing human IgG₁ control (lacking substitutions of the present invention) was kept to determine level of affinity of Fc variant of the current invention towards Fc gamma receptors.

TABLE 11
Kinetic constant of Fc variant to Fc gamma receptors

| Type of Fc | | | | |
|---|---|---|---|---|
| gamma receptor | Sample code | Kₐ | K_{d} | K_{D} |
| FcγRIIIa (Phe) | H11 + A4 | 3.15E+05 | 7.62E−02 | 2.41E−07 |
| | IgG₁ control | 1.27E+05 | 2.80E−01 | 2.20E−06 |
| FcγRIIIa (Val) | H11 + A4 | 1.62E+05 | 3.33E−02 | 2.05E−07 |
| | IgG₁ control | 4.79E+04 | 6.13E−02 | 1.28E−06 |

[0191] As it can be seen from table 11, Fc variant of the current invention can block FcγRIIIa (including allotypes V158 and F158) with high affinity as compared to a molecule representing IgG₁ control. This illustrated activity of Fc variant of the current invention of blocking Fc gamma receptors shows that Fc variant of the current invention can inhibit immune-complex mediated FcγR activation.

### Example 9: Construction of Monomer and Multimer (Dimer) DGV-H11A4 of Fc Variant Having SEQ ID No. 22

[0192] Chemically synthesized gene of the Fc variant monomer having amino acid sequence of SEQ ID NO. 22 (H11+A4; It can also be referred as H11A4.), and Fc dimer, having amino acid sequence of SEQ ID NO. 22 (H11+A4; It can be referred as H11A4.), in which two chains of Fc variant monomer were linked with Glycine-serine linker (SEQ ID NO. A-GGGSGGGSGGGSGGGSSGGGSS) and cysteine residue at EU position 226 and 229 of second chain, were changed to serine to prevent self-dimerization were, obtained in pMK vector were obtained from Geneart, Germany. Fc variant monomer and dimer genes were isolated from pMK Geneart constructs by restriction digestion with HindIII and EcoRI. The HindIII and EcoRI digested Fc variant monomer H11A4 gene of ˜0.7 kb and Fc variant dimer of ˜1.5 kb were individually ligated to HindIII and EcoRI digested pXC-17.4 vector (Lonza) and pXC-18.4 vector (Lonza). The ligation products were transformed in E. coli Top10F′ and transformants were scored on the basis of ampicillin resistance. The clones were analysed by restriction digestion with HindIII and EcoRI. A positive clone from each pXC-17.4 H11A4 monomer and dimer and pXC-18.4 H11A4 monomer and dimer were digested with SalI and NotI. The digested products were resolved on 1% agarose gel. The final DGV H11A4 monomer, carrying two expression assemblies were prepared by ligating ˜6.9 kb fragment from pXCH11A4 monomer and ˜2.7 kb fragment from pXC-18.4 H11A4 monomer. Similarly, the final DGV H11A4 dimer carrying two expression assemblies, was prepared by ligating ˜7.7 kb fragment from pXCH11A4 dimer and ˜3.5 kb fragment from pXC-18.4 H11A4 dimer. The ligation products were transformed in E. coli Top 10F′ and transformants were scored based on the ampicillin resistance. Final DGV-H11A4 monomer and dimer vectors were confirmed by restriction digestion characterization and Sanger sequencing. The vector was linearized with PvuI for transfection in CHO-GS cells (Lonza). A map of the vector used for the preparation of Fc monomer and Fc dimer is given here as FIG. 2.

### Example 10: Construction of Full-Length Antibody DGV-H11A4 with Fc Variant Having SEQ ID No. 22

[0193] Fc variant H11A4 was prepared as full-length monoclonal antibody molecule by joining the Fc region with unrelated (not cross reactive to human/mice/NHP) heavy chain variable domain in combination with unrelated (not cross reactive to human/mice/NHP) light chain. Fc variant H11A4 region was amplified to insert CH1 domain and ApaI restriction site at 5′ end and EcoRI restriction site at 3′ end. This ˜1.0 kb insert was digested with ApaI and EcoRI to facilitate cloning in frame with heavy chain variable region. The MluI and ApaI digested variable region of heavy chain, gene of ˜0.5 kb and ApaI-EcoRI digested H11A4 PCR fragment was ligated to MluI and EcoRI digested DGV vector harbouring light chain gene. Ligation product was transformed into E. coli Top10F′ cells and transformants were scored based on the ampicillin resistance. Final DGV-H11A4 mAb vector was confirmed by restriction digestion characterization and Sanger sequencing. The vector was linearized with PvuI for transfection in CHO-GS cells (Lonza). A map of the vector used for the generation of full-length antibody comprising Fc monomer is given here as FIG. 3.

### Example 11: Generation of Cell Lines Expression Fc Constructs

[0194] This example describes the generation of stable transfected cell lines expressing Fc variants. All vector constructs as described in examples 9 and 10 were used for transfections. Plasmids were linearized with PvuI restriction enzyme prior to transfection. Chinese Hamster ovary (CHO), which is one of the suitable hosts for expression of recombinant proteins, was used for cell line generation. CHO cells were seeded ˜24 hours prior to transfection at a density of 0.5 million/mL to have cells in the exponential phase. Transfections were performed using Neon Transfection system (Invitrogen) by electroporation technique following manufacturer's instructions. Post-transfection, cells were plated in 24 well cell culture plates containing 1 mL of pre-warmed ProCHO5 Serum Free media (Lonza, Switzerland) containing selection pressure and incubated in a humidified incubator at 37° C. in presence of 5% CO₂. The cell numbers of all the transfected pools were regularly monitored and regular media exchanges were given. Once the cells recovered from transfection, cells were further expanded to 6 well culture plates, T-flasks and culti-tubes (TPP).

[0195] Fed-batch cultures were performed for transfected pools of all Fc variant candidates in culti-tube (TPP) for recombinant protein production. Cells were seeded at a density of 0.3×10⁶ cells/mL in ActiPro production medium from Hyclone, GE. Culti tubes were incubated in a humidifed Kuhner shaker at 37° C. temperature, 5% CO₂ level with shaking speed of 230 RPM. A fixed daily feeding regimen was followed during the culture for all the pools using chemically defined feeds from Hyclone, GE. After 72 hours of culture, feeding was initiated and continued till the batch was harvested.

[0196] Upon harvest, the culture supernatants were collected for protein purification by Protein A affinity chromatography. These purified protein candidates were further tested for various in-vitro assays as described in above examples. It has been observed that Fc variant (SEQ ID No. 22) in multimeric form and Fc variant in full-length antibody form has technical effect similar to Fc monomer. Thus, the Fc variant of the current invention can achieve the same technical effect in all the constructed form (monomer, multimer and full-length antibody).

### Example 12: Effect of Fc Variant on Total Serum IgG Levels in Wild-Type C57BL/6 Mice

[0197] In the present study, Fc dimer prepared according to example 9 was compared to commercially available IVIg to determine the effect of Fc variant of the present invention on total serum IgG level in circulation. Wild-type C57BL/6 mice were randomized based on their body weight. At zero time point (Pre-dose), blood collection was performed. Within 1 hour, 50 mg/kg of Fc dimer and 1 g/kg of IVIg were administered via intra-venous route to respective group of study animals (6 mice per group). Blood samples were collected at time points—5 h, 24 h (Day 1), 48 h (Day 2), 72 h (Day 3), 144 h (Day 6), 216 h (Day 9), 288 h (Day 12) and 312 h (Day 13). Endogenous IgG levels were determined using ELISA from the collected samples at mentioned time points. The results in graphical presentation are shown in FIG. 4. Both IVIg and Fc dimer showed a reduction in endogenous mouse IgG levels as compared to control, with Fc dimer showing greater IgG clearance as compared to IVIg till day 6. Lowest % IgG reduction of ˜47% was observed with Fc dimer as compared to ˜66% with IVIg in relation to pre-dose IgG. Albumin levels were also determined at the mentioned time points. Overall, no differences were observed across all time points and groups (FIG. 5). Fc dimer prepared according to the current invention did not impact the albumin levels in serum. It evident that the Fc variant prepared according to the current invention does not interfere with the binding site of albumin on FcRn and allow FcRn to maintain albumin level in serum. Similar experiment was conducted following the same process as described herein example 12 for full-length antibody containing Fc variant of the current invention as well as monomeric form of Fc variant of the current invention having SEQ ID No. 22.

### Example 13: Effect of Fc Variant on Fc Gamma Receptors Dependent ADCC Activity

[0198] SKBR3 cells were stained with Calcein-AM dye, seeded with trastuzumab at EC₅₀ and EC₇₅ concentration of 10.39 ng/mL and 31.17 ng/mL respectively, and incubated for 30 min at 37° C. and 5% CO₂. To determine whether Fc dimer prepared according to example 9 could block ADCC, serially diluted Fc dimer starting from 100 μg/mL and human PBMC at 1:30 ratio of target to effector cells were added to the wells containing SKBR3 cells and incubated for 4 hrs at 37° C. and 5% CO₂. Following incubation, the plates at 2000 rpm was centrifuged for 5 minutes at 25° C. and 100 μL supernatant was collected and transferred it to 96 well black clear bottom plate. Reading was taken in plate reader at excitation 494 nm and emission at 515 nm, with cut off set at 515 nm. Results are shown in FIG. 6. As it can be seen in FIG. 6, Fc dimer of the current invention can reduce ADCC activity mediated by trastuzumab confirming that by its stronger binding to Fc gamma receptors, it can prevent the binding of trastuzumab to NK cells present in PBMCs.

### Example 14: Effect of Fc Variant in Chronic Idiopathic Thrombocytopenia Purpura (ITP) Animal Model

[0199] In the present study, the therapeutic potency of H11+A4 (SEQ ID NO. 22) was tested in a mouse model of acute immune thrombocytopenia. Specifically, C57BL/6 mice were randomized based on their body weight and subsequently treated with two different doses of H11+A4 (i.e., 0.5 mg/20 gm of mice & 1 mg/20 gm of mice) or with phosphate buffered saline via intravenous injection (7 animals/group). One hour later, mice were treated with anti-platelet antibody MWReg30 (5 μg/20 gm of mice) or with phosphate buffered saline via intravenous route. After 24 hours, once again mice were treated with MWReg30 (5 μg/20 gm of mice) or with phosphate buffered saline via intraperitoneal route. Blood samples were collected for determination of platelet counts at 72 hours after 1^{st} injection of MWReg30. Platelet counts were determined via haematology analyser from collected samples & plotted. Result is shown in FIG. 7. As it can be seen from FIG. 7, pre-treatment with H11+A4 reduced MWReg30 (anti-platelet antibody) induced thrombocytopenia at both the dose levels in dose dependant manner & molecule has significant potential to ameliorate thrombocytopenic condition.

### REFERENCES INCORPORATED IN CURRENT PATENT APPLICATION

[0200] 1. Leona E. Ling 1, Jan L. Hillson, M281, an Anti-FcRn Antibody: Pharmacodynamics, Pharmacokinetics, and Safety Across the Full Range of IgG Reduction in a First-in-Human Study, Clinical Pharmacology & Therapeutics, Volume 105 Number 4, April 2019
[0201] 2. Peter Kiessling et al., The FcRn inhibitor rozanolixizumab reduces human serum IgG concentration: A randomized phase 1 study, Sci. Transl. Med. 9, eaan1208, November 2017
[0202] 3. T. Sockolosky, F. C. Szoka, The neonatal Fc receptor, FcRn, as a target for drug delivery and therapy, Adv. Drug Deliv. Rev., 91, 109-124, 2015
[0203] 4. Deisenhofer, Crystallographic refinement and atomic models of a human Fc fragment and its complex with fragment B of protein A from Staphylococcus aureus at 2.9- and 2.8-.ANG. resolution, Biochemistry 20:2361-2370, 1981
[0204] 5. Edelman, G. M. et al., The covalent structure of an entire gamma G immunoglobulin molecule. Proc. Natl. Acad. USA, 63, 78-85, 1969
[0205] 6. Roux et al., Comparisons of the Ability of Human IgG3 Hinge Mutants, IgM, IgE, and IgA2, to Form Small Immune Complexes: A Role for Flexibility and Geometry, J. Immunol. 161: 4083, 1998
[0206] 7. Jefferis et al., Interaction sites on human IgG-Fc for FcgR: current models, Immunol Lett., 82:57-65, 2002
[0207] 8. Angal S, King D J, Bodmer M W, Turner A, Lawson A D, Roberts G, Pedley B, Adair J R. A single amino acid substitution abolishes the heterogeneity of chimeric mouse/human (IgG4) antibody. Mol Immunol. 30(1): 105-8, 1993.
[0208] 9. Huovinen T, Brockmann E-C, Akter S, Perez-Gamarra S, Yla″-Pelto J, et al., Primer Extension Mutagenesis Powered by Selective Rolling Circle Amplification., Volume 7, Issue 2, e31817, 2012

### INCORPORATION BY REFERENCE

[0209] The entire disclosure of each of the patent documents and scientific articles referred to herein is incorporated by reference for all purposes.

### EQUIVALENTS

[0210] The invention may be embodied in other specific forms without departing from the spirit or essential characteristics thereof. The foregoing embodiments are therefore to be considered in all respects illustrative rather than limiting the invention described herein. Scope of the invention is thus indicated by the appended claims rather than by the foregoing description, and all changes that come within the meaning and range of equivalency of the claims are intended to be embraced therein.

1. An Fc variant comprising combination of substituting amino acids at specific EU position in wild-type Fc protein wherein said Fc variant binds with high affinity to human FcRn relative to the wild-type Fc protein and comprising amino acid sequence selected from SEQ ID NO. 1, SEQ ID NO. 2, SEQ ID NO. 3, SEQ ID NO. 4, SEQ ID NO. 5, SEQ ID NO. 7, SEQ ID NO. 9, SEQ ID NO. 11, SEQ ID NO. 14, SEQ ID NO. 15, SEQ ID NO. 18, SEQ ID NO. 20, SEQ ID NO. 21, SEQ ID NO. 22, SEQ ID NO. 23, SEQ ID NO. 24, SEQ ID NO. 25, SEQ ID NO. 26, SEQ ID NO. 27, SEQ ID NO. 29, SEQ ID NO. 30, SEQ ID NO. 31, SEQ ID NO. 32, SEQ ID NO. 34, SEQ ID NO. 35, SEQ ID NO. 36, SEQ ID NO. 38, SEQ ID NO. 39, SEQ ID NO. 40, SEQ ID NO. 41, SEQ ID NO. 42, SEQ ID NO. 43, SEQ ID NO. 44, SEQ ID NO. 45, SEQ ID NO. 46, SEQ ID NO. 47, SEQ ID NO. 48, SEQ ID NO. 49, SEQ ID NO. 50, SEQ ID NO. 51, SEQ ID NO. 52, SEQ ID NO. 53, SEQ ID NO. 54, SEQ ID NO. 55, SEQ ID NO. 56, SEQ ID NO. 57, SEQ ID NO. 58, SEQ ID NO. 59, SEQ ID NO. 60, SEQ ID NO. 61, SEQ ID NO. 62, SEQ ID NO. 63, SEQ ID NO. 64, SEQ ID NO. 65, SEQ ID NO. 66, SEQ ID NO. 67, SEQ ID NO. 68, SEQ ID NO. 69, SEQ ID NO. 70, SEQ ID NO. 71, SEQ ID NO. 72, SEQ ID NO. 73, SEQ ID NO. 74, SEQ ID NO. 75, SEQ ID NO. 76, SEQ ID NO. 77, SEQ ID NO. 78, SEQ ID NO. 79, SEQ ID NO. 80, SEQ ID NO. 81, SEQ ID NO. 82, SEQ ID NO. 83, SEQ ID NO. 84, SEQ ID NO. 85, SEQ ID NO. 86, SEQ ID NO. 87, SEQ ID NO. 88, SEQ ID NO. 89, SEQ ID NO. 90, SEQ ID NO. 91, SEQ ID NO. 92, SEQ ID NO. 93, SEQ ID NO. 94, SEQ ID NO. 95, SEQ ID NO. 96, SEQ ID NO. 97, SEQ ID NO. 98, SEQ ID NO. 99, SEQ ID NO. 100, SEQ ID NO. 101, SEQ ID NO. 102, SEQ ID NO. 103, SEQ ID NO. 104, SEQ ID NO. 105, SEQ ID NO. 106, SEQ ID NO. 107, SEQ ID NO. 108, SEQ ID NO. 109, SEQ ID NO. 110, SEQ ID NO. 111, SEQ ID NO. 112, SEQ ID NO. 113, SEQ ID NO. 114, SEQ ID NO. 115, SEQ ID NO. 116, SEQ ID NO. 117, SEQ ID NO. 118, SEQ ID NO. 119, SEQ ID NO. 120, SEQ ID NO. 121, SEQ ID NO. 122, SEQ ID NO. 123, SEQ ID NO. 124, SEQ ID NO. 125, SEQ ID NO. 126, SEQ ID NO. 127, SEQ ID NO. 128, SEQ ID NO. 129, SEQ ID NO. 130, SEQ ID NO. 131, SEQ ID NO. 132, SEQ ID NO. 133, SEQ ID NO. 134, SEQ ID NO. 135, SEQ ID NO. 136, SEQ ID NO. 137, SEQ ID NO. 138, SEQ ID NO. 139, SEQ ID NO. 140, SEQ ID NO. 141, SEQ ID NO. 142, SEQ ID NO. 143, SEQ ID NO. 144, SEQ ID NO. 145, SEQ ID NO. 146, SEQ ID NO. 147, SEQ ID NO. 148, SEQ ID NO. 149, SEQ ID NO. 150, SEQ ID NO. 151, SEQ ID NO. 152, SEQ ID NO. 153, SEQ ID NO. 154, SEQ ID NO. 155, SEQ ID NO. 156, SEQ ID NO. 157, SEQ ID NO. 158, SEQ ID NO. 159, SEQ ID NO. 160, SEQ ID NO. 161, SEQ ID NO. 162, SEQ ID NO. 163, SEQ ID NO. 164, SEQ ID NO. 165, SEQ ID NO. 166, SEQ ID NO. 167, SEQ ID NO. 168, SEQ ID NO. 169, SEQ ID NO. 170, SEQ ID NO. 171, SEQ ID NO. 172, SEQ ID NO. 173, SEQ ID NO. 174, SEQ ID NO. 175, SEQ ID NO. 176, SEQ ID NO. 177, SEQ ID NO. 178, SEQ ID NO. 179, SEQ ID NO. 180, SEQ ID NO. 181, SEQ ID NO. 182, SEQ ID NO. 183, SEQ ID NO. 184, SEQ ID NO. 185, SEQ ID NO. 186, SEQ ID NO. 187, SEQ ID NO. 188, SEQ ID NO. 189, SEQ ID NO. 190, SEQ ID NO. 191, SEQ ID NO. 192, SEQ ID NO. 193, SEQ ID NO. 194, SEQ ID NO. 195, SEQ ID NO. 196, SEQ ID NO. 197, SEQ ID NO. 198, SEQ ID NO. 199, SEQ ID NO. 200, SEQ ID NO. 201, SEQ ID NO. 202, SEQ ID NO. 203, SEQ ID NO. 204, SEQ ID NO. 205, SEQ ID NO. 206, SEQ ID NO. 207, SEQ ID NO. 208, SEQ ID NO. 209, SEQ ID NO. 210, SEQ ID NO. 211, SEQ ID NO. 212, SEQ ID NO. 213, SEQ ID NO. 214, SEQ ID NO. 215, SEQ ID NO. 216, SEQ ID NO. 217, SEQ ID NO. 218, SEQ ID NO. 219, SEQ ID NO. 220, SEQ ID NO. 221, SEQ ID NO. 222, SEQ ID NO. 223, SEQ ID NO. 224, SEQ ID NO. 225, SEQ ID NO. 226, SEQ ID NO. 227, SEQ ID NO. 228, SEQ ID NO. 229, SEQ ID NO. 230, SEQ ID NO. 231, SEQ ID NO. 232, SEQ ID NO. 233, SEQ ID NO. 234, SEQ ID NO. 235, SEQ ID NO. 236, SEQ ID NO. 237, SEQ ID NO. 238, SEQ ID NO. 239, SEQ ID NO. 240, SEQ ID NO. 241, SEQ ID NO. 242, SEQ ID NO. 243, SEQ ID NO. 244, SEQ ID NO. 245, SEQ ID NO. 246, SEQ ID NO. 247, SEQ ID NO. 248, SEQ ID NO. 249, SEQ ID NO. 250, SEQ ID NO. 251, SEQ ID NO. 252, SEQ ID NO. 253, SEQ ID NO. 254, SEQ ID NO. 255, SEQ ID NO. 256, SEQ ID NO. 257, SEQ ID NO. 258, SEQ ID NO. 259, SEQ ID NO. 260, SEQ ID NO. 261, SEQ ID NO. 262, SEQ ID NO. 263, SEQ ID NO. 264, SEQ ID NO. 265, SEQ ID NO. 266, SEQ ID NO. 267, SEQ ID NO. 268, SEQ ID NO. 269, SEQ ID NO. 270, SEQ ID NO. 271, SEQ ID NO. 272, SEQ ID NO. 273, SEQ ID NO. 274, SEQ ID NO. 275, SEQ ID NO. 276, SEQ ID NO. 277, SEQ ID NO. 278, SEQ ID NO. 279, SEQ ID NO. 280, SEQ ID NO. 281, SEQ ID NO. 282, SEQ ID NO. 283, SEQ ID NO. 284, SEQ ID NO. 285, SEQ ID NO. 286, SEQ ID NO. 287, SEQ ID NO. 288, SEQ ID NO. 289, SEQ ID NO. 290, SEQ ID NO. 291, SEQ ID NO. 292, SEQ ID NO. 293, SEQ ID NO. 294, SEQ ID NO. 295, SEQ ID NO. 296, SEQ ID NO. 297, SEQ ID NO. 298, SEQ ID NO. 299, SEQ ID NO. 300, SEQ ID NO. 301, SEQ ID NO. 302, SEQ ID NO. 303, SEQ ID NO. 304, SEQ ID NO. 305, SEQ ID NO. 306, SEQ ID NO. 307, SEQ ID NO. 308, SEQ ID NO. 309, SEQ ID NO. 310, SEQ ID NO. 311, SEQ ID NO. 312, SEQ ID NO. 313, SEQ ID NO. 314, SEQ ID NO. 315, SEQ ID NO. 316, SEQ ID NO. 317, SEQ ID NO. 318, SEQ ID NO. 319, SEQ ID NO. 320, SEQ ID NO. 321, SEQ ID NO. 322, SEQ ID NO. 323, SEQ ID NO. 324, SEQ ID NO. 325, SEQ ID NO. 326, SEQ ID NO. 327, SEQ ID NO. 328, SEQ ID NO. 329, SEQ ID NO. 330, SEQ ID NO. 331, SEQ ID NO. 332, SEQ ID NO. 333, SEQ ID NO. 334, SEQ ID NO. 335, SEQ ID NO. 336, SEQ ID NO. 337, SEQ ID NO. 338, SEQ ID NO. 339, SEQ ID NO. 340, SEQ ID NO. 341, SEQ ID NO. 342, SEQ ID NO. 343, SEQ ID NO. 344, SEQ ID NO. 345, SEQ ID NO. 346 and SEQ ID NO. 347.

2. (canceled)

3. The Fc variant as claimed in claim 1, having higher binding affinity towards FcRn at pH 6.0 as compared to its said affinity at neutral pH.

4. The Fc variant as claimed in claim 1, having a K_{D} of 10⁻⁸M or less, more preferably 10⁻¹⁰ M or less for FcRn.

5. The Fc variant as claimed in claim 1, that cross-reacts with FcRn from species other than human.

6. The Fc variant as claimed in claim 1 is present in Fc protein of IgG₁, IgG₂, IgG₃, IgG₄ or IgG₂/G₄ isotype, preferably the IgG₁ isotype.

7. The Fc variant as claimed in claim 1 which is expressed in multimer form to increase half-life by increasing the molecular size and affinity through higher avidity of the Fc variant.

8. The multimeric form as claimed in claim 7 is selected from dimer, trimer, tetramer, pentamer and hexamer.

9. The Fc variant as claimed in claim 1 is present in full-length antibody form.

10. The Fc variant as claimed in claim 1 has altered affinity for an Fc gamma receptor relative to the affinity of a wild-type IgG₁ Fc region for the said Fc gamma receptor.

11. The Fc variant as claimed in claim 10, has increased affinity for FcγRIIIa (CD16a) relative to the affinity of a wild-type IgG₁ Fc region for FcγRIIIa including allotypes V158 and F158.

12. The Fc variant as claimed in claim 11, comprising at least one of the following characteristic(s):
a) has an increased half-life in subject;
b) has reduced/no ADCC activity relative to wild-type Fc protein;
c) inhibits phagocytosis mediated by FcγRs and
d) inhibits cytokine release mediated by FcγRs.

13. The Fc variant as claimed in claim 1 is fused to a drug or a therapeutic peptide or polyethylene glycol or an immunogen or neutralizing antibody.

14. The Fc variant as claimed in claim 1 comprises an afucosylated N-linked glycan at EU position 297.

15. The Fc variant as claimed in claim 1 comprising an amino acid sequence selected from sequences as set forth in SEQ ID NO. 1, SEQ ID NO. 2, SEQ ID NO. 3, SEQ ID NO. 4, SEQ ID NO. 5, SEQ ID NO. 7, SEQ ID NO. 9, SEQ ID NO. 11, SEQ ID NO. 14, SEQ ID NO. 15, SEQ ID NO. 18, SEQ ID NO. 20, SEQ ID NO. 21, SEQ ID NO. 22, SEQ ID NO. 23, SEQ ID NO. 24, SEQ ID NO. 25, SEQ ID NO. 26, SEQ ID NO. 27, SEQ ID NO. 29, SEQ ID NO. 30, SEQ ID NO. 31, SEQ ID NO. 32, SEQ ID NO. 34, SEQ ID NO. 35, SEQ ID NO. 36, SEQ ID NO. 38, SEQ ID NO. 39, SEQ ID NO. 40, SEQ ID NO. 41, SEQ ID NO. 42, SEQ ID NO. 43, SEQ ID NO. 44, SEQ ID NO. 45, SEQ ID NO. 46, SEQ ID NO. 47, SEQ ID NO. 48 and SEQ ID NO. 49.

16. The Fc variant as claimed in claim 1 comprising an amino acid sequence selected from sequences as set forth in SEQ ID NO. 3, SEQ ID NO. 5, SEQ ID NO. 10, SEQ ID NO. 20 or SEQ ID NO. 22.

17. The Fc variant as claimed in claim 16, wherein SEQ ID NO. 22 comprising substitutions T307N, V308P, L309Y, H433R and N434W.

18. The Fc variant as claimed in claim 17, wherein SEQ ID NO. 22 has amino acid sequence selected from SEQ ID NO. 22a, SEQ ID NO. 22b, SEQ ID NO. 22c, SEQ ID NO. 22d SEQ ID NO. 22e and SEQ ID NO. 22f and SEQ ID NO. 22g.

19. A composition comprising Fc variant of any preceding claim and an acceptable carrier.

20. The Fc variant as claimed in any preceding claim is for use in the preparation of a drug either for treating diseases where activity of FcRn is detrimental or for increasing the circulating half-life of a drug or for targeting the drug to certain cells or tissues.

21. The Fc variant as claimed in claim 20 wherein disease is selected from infections, cancer and auto immune disorder.

The application's sequence listing, which the Patent Office published only in electronic form, follows.

SEQUENCE LISTING (347 sequences)

SEQ ID NO: 1 - protein, 227 aa, Artificial Sequence
  Amino acid sequence of Fc variant designated as SEQ ID NO. 1 in description
DKTHTCPPCPAPELLGGPSVFLFPPKPKDQHLPSRTPEVTCVVVDVSHEDPEVKFNWYVDGVEVHNAKTKPREEQYNSTYRVVSVLTVLHQDWLNGKEYKCKVSNKALPAPIEKTISKAKGQPREPQVYTLPPSRDELTKNQVSLTCLVKGFYPSDIAVEWESNGQPENNYKTTPPVLDSDGSFFLYSKLTVDKSRWQQGNVFSCSVMHEALHNHYTQKSLSLSPGK

SEQ ID NO: 2 - protein, 227 aa, Artificial Sequence
  Amino acid sequence of Fc variant designated as SEQ ID NO. 2 in description
DKTHTCPPCPAPELLGGPSVFLFPPKPKDRAVSSRTPEVTCVVVDVSHEDPEVKFNWYVDGVEVHNAKTKPREEQYNSTYRVVSVLTVLHQDWLNGKEYKCKVSNKALPAPIEKTISKAKGQPREPQVYTLPPSRDELTKNQVSLTCLVKGFYPSDIAVEWESNGQPENNYKTTPPVLDSDGSFFLYSKLTVDKSRWQQGNVFSCSVMHEALHNHYTQKSLSLSPGK

SEQ ID NO: 3 - protein, 227 aa, Artificial Sequence
  Amino acid sequence of Fc variant designated as SEQ ID NO. 3 in description
DKTHTCPPCPAPELLGGPSVFLFPPKPKDTLMISRTPEVTCVVVDVSHEDPEVKFNWYVDGVEVHNAKTKPREEQYNSTYRVVSVLNPYHQDWLNGKEYKCKVSNKALPAPIEKTISKAKGQPREPQVYTLPPSRDELTKNQVSLTCLVKGFYPSDIAVEWESNGQPENNYKTTPPVLDSDGSFFLYSKLTVDKSRWQQGNVFSCSVMHEALHNHYTQKSLSLSPGK

SEQ ID NO: 4 - protein, 227 aa, Artificial Sequence
  Amino acid sequence of Fc variant designated as SEQ ID NO. 4 in description
DKTHTCPPCPAPELLGGPSVFLFPPKPKDTLMISRTPEVTCVVVDVSHEDPEVKFNWYVDGVEVHNAKTKPREEQYNSTYRVVSVLTVLHQDWLNGKEYKCKVSNKALPAPIEKTISKAKGQPREPQVYTLPPSRDELTKNQVSLTCLVKGFYPRDLAVEWESNGQPENNYKTTPPVLDSDGSFFLYSKLTVDKSRWQQGNVFSCSVMHEALHNHYTQKSLSLSPGK

SEQ ID NO: 5 - protein, 227 aa, Artificial Sequence
  Amino acid sequence of Fc variant designated as SEQ ID NO. 5 in description
DKTHTCPPCPAPELLGGPSVFLFPPKPKDTLMISRTPEVTCVVVDVSHEDPEVKFNWYVDGVEVHNAKTKPREEQYNSTYRVVSVLTVLHQDWLNGKEYKCKVSNKALPAPIEKTISKAKGQPREPQVYTLPPSRDELTKNQVSLTCLVKGFYPSDIAIQQESNGQPENNYKTTPPVLDSDGSFFLYSKLTVDKSRWQQGNVFSCSVMHEALHNHYTQKSLSLSPGK

SEQ ID NO: 6 - protein, 227 aa, Artificial Sequence
  Amino acid sequence of Fc variant designated as SEQ ID NO. 6 in description
DKTHTCPPCPAPELLGGPSVFLFPPKPKDTLMISRTPEVTCVVVDVSHEDPEVKFNWYVDGVEVHNAKTKPREEQYNSTYRVVSVLTVLHQDWLNGKEYKCKVSNKALPAPIEKTISKAKGQPREPQVYTLPPSRDELTKNQVSLTCLVKGFYPSDIAVEWESNGQPENNYKTTPPVLDSDGSFFLYSKLTVDKSRWQQGNVFSCSVMHEALRWHYTQKSLSLSPGK

SEQ ID NO: 7 - protein, 227 aa, Artificial Sequence
  Amino acid sequence of Fc variant designated as SEQ ID NO. 7 in description
DKTHTCPPCPAPELLGGPSVFLFPPKPKDTLMISRTPEVTCVVVDVSHEDPEVKFNWYVDGVEVHNAKTKPREEQYNSTYRVVSVLTVLHQDWLNGKEYKCKVSNKALPAPIEKTISKAKGQPREPQVYTLPPSRDELTKNQVSLTCLVKGFYPSDIAVEWESNGQPENNYKTTPPVLDSDGSFFLYSKLTVDKSRWQQGNVFSCSVMHEASTYHYTQKSLSLSPGK

SEQ ID NO: 8 - protein, 227 aa, Artificial Sequence
  Amino acid sequence of Fc variant designated as SEQ ID NO. 8 in description
DKTHTCPPCPAPELLGGPSVFLFPPKPKDTLMISRTPEVTCVVVDVSHEDPEVKFNWYVDGVEVHNAKTKPREEQYNSTYRVVSVLTVLHQDWLNGKEYKCKVSNKALPAPIEKTISKAKGQPREPQVYTLPPSRDELTKNQVSLTCLVKGFYPSDIAVEWESNGQPENNYKTTPPVLDSDGSFFLYSKLTVDKSRWQQGNVFSCSVMHEALRYHYTQKSLSLSPGK

SEQ ID NO: 9 - protein, 227 aa, Artificial Sequence
  Amino acid sequence of Fc variant designated as SEQ ID NO. 9 in description
DKTHTCPPCPAPELLGGPSVFLFPPKPKDTLMISRTPEVTCVVVDVSHEDPEVKFNWYVDGVEVHNAKTKPREEQYNSTYRVVSVLTVLHQDWLNGKEYKCKVSNKALPAPIEKTISKAKGQPREPQVYTLPPSRDELTKNQVSLTCLVKGFYPSDIAVEWESNGQPENNYKTTPPVLDSDGSFFLYSKLTVDKSRWQQGNVFSCSVMHEALTHQYTQKSLSLSPGK

SEQ ID NO: 10 - protein, 227 aa, Artificial Sequence
  Amino acid sequence of Fc variant designated as SEQ ID NO. 10 in description
DKTHTCPPCPAPELLGGPSVFLFPPKPKDTLMISRTPEVTCVVVDVSHEDPEVKFNWYVDGVEVHNAKTKPREEQYNSTYRVVSVLTVLHQDWLNGKEYKCKVSNKALPAPIEKTISKAKGQPREPQVYTLPPSRDELTKNQVSLTCLVKGFYPSDIAVEWESNGQPENNYKTTPPVLDSDGSFFLYSKLTVDKSRWQQGNVFSCSVMHEALQWHYTQKSLSLSPGK

SEQ ID NO: 11 - protein, 227 aa, Artificial Sequence
  Amino acid sequence of Fc variant designated as SEQ ID NO. 11 in description
DKTHTCPPCPAPELLGGPSVFLFPPKPKDTLMISRTPEVTCVVVDVSHEDPEVKFNWYVDGVEVHNAKTKPREEQYNSTYRVVSVLTVLHQDWLNGKEYKCKVSNKALPAPIEKTISKAKGQPREPQVYTLPPSRDELTKNQVSLTCLVKGFYPSDIAVEWESNGQPENNYKTTPPVLDSDGSFFLYSKLTVDKSRWQQGNVFSCSVMHEALPWKYTQKSLSLSPGK

SEQ ID NO: 12 - protein, 227 aa, Artificial Sequence
  Amino acid sequence of Fc variant designated as SEQ ID NO. 12 in description
DKTHTCPPCPAPELLGGPSVFLFPPKPKDTLMISRTPEVTCVVVDVSHEDPEVKFNWYVDGVEVHNAKTKPREEQYNSTYRVVSVLTVLHQDWLNGKEYKCKVSNKALPAPIEKTISKAKGQPREPQVYTLPPSRDELTKNQVSLTCLVKGFYPSDIAVEWESNGQPENNYKTTPPVLDSDGSFFLYSKLTVDKSRWQQGNVFSCSVMHEALRHKYTQKSLSLSPGK

SEQ ID NO: 13 - protein, 227 aa, Artificial Sequence
  Amino acid sequence of Fc variant designated as SEQ ID NO. 13 in description
DKTHTCPPCPAPELLGGPSVFLFPPKPKDTLMISRTPEVTCVVVDVSHEDPEVKFNWYVDGVEVHNAKTKPREEQYNSTYRVVSVLTVLHQDWLNGKEYKCKVSNKALPAPIEKTISKAKGQPREPQVYTLPPSRDELTKNQVSLTCLVKGFYPSDIAVEWESNGQPENNYKTTPPVLDSDGSFFLYSKLTVDKSRWQQGNVFSCSVMHEACKFHYTQKSLSLSPGK

SEQ ID NO: 14 - protein, 227 aa, Artificial Sequence
  Amino acid sequence of Fc variant designated as SEQ ID NO. 14 in description
DKTHTCPPCPAPELLGGPSVFLFPPKPKDTLMISRTPEVTCVVVDVSHEDPEVKFNWYVDGVEVHNAKTKPREEQYNSTYRVVSVLTVLHQDWLNGKEYKCKVSNKALPAPIEKTISKAKGQPREPQVYTLPPSRDELTKNQVSLTCLVKGFYPSDIAVEWESNGQPENNYKTTPPVLDSDGSFFLYSKLTVDKSRWQQGNVFSCSVMHEAWFDKYTQKSLSLSPGK

SEQ ID NO: 15 - protein, 227 aa, Artificial Sequence
  Amino acid sequence of Fc variant designated as SEQ ID NO. 15 in description
DKTHTCPPCPAPELLGGPSVFLFPPKPKDTLMISRTPEVTCVVVDVSHEDPEVKFNWYVDGVEVHNAKTKPREEQYNSTYRVVSVLTVLHQDWLNGKEYKCKVSNKALPAPIEKTISKAKGQPREPQVYTLPPSRDELTKNQVSLTCLVKGFYPSDIAVEWESNGQPENNYKTTPPVLDSDGSFFLYSKLTVDKSRWQQGNVFSCSVMHEAFSGHYTQKSLSLSPGK

SEQ ID NO: 16 - protein, 227 aa, Artificial Sequence
  Amino acid sequence of Fc variant designated as SEQ ID NO. 16 in description
DKTHTCPPCPAPELLGGPSVFLFPPKPKDTLMISRTPEVTCVVVDVSHEDPEVKFNWYVDGVEVHNAKTKPREEQYNSTYRVVSVLTVLHQDWLNGKEYKCKVSNKALPAPIEKTISKAKGQPREPQVYTLPPSRDELTKNQVSLTCLVKGFYPSDIAVEWESNGQPENNYKTTPPVLDSDGSFFLYSKLTVDKSRWQQGNVFSCSVMHEALRFHYTQKSLSLSPGK

SEQ ID NO: 17 - protein, 227 aa, Artificial Sequence
  Amino acid sequence of Fc variant designated as SEQ ID NO. 17 in description
DKTHTCPPCPAPELLGGPSVFLFPPKPKDTLMISRTPEVTCVVVDVSHEDPEVKFNWYVDGVEVHNAKTKPREEQYNSTYRVVSVLTVLHQDWLNGKEYKCKVSNKALPAPIEKTISKAKGQPREPQVYTLPPSRDELTKNQVSLTCLVKGFYPSDIAVEWESNGQPENNYKTTPPVLDSDGSFFLYSKLTVDKSRWQQGNVFSCSVMHEALPYHYTQKSLSLSPGK

SEQ ID NO: 18 - protein, 227 aa, Artificial Sequence
  Amino acid sequence of Fc variant designated as SEQ ID NO. 18 in description
DKTHTCPPCPAPELLGGPSVFLFPPKPKDTLMISRTPEVTCVVVDVSHEDPEVKFNWYVDGVEVHNAKTKPREEQYNSTYRVVSVLTVLHQDWLNGKEYKCKVSNKALPAPIEKTISKAKGQPREPQVYTLPPSRDELTKNQVSLTCLVKGFYPSDIAVEWESNGQPENNYKTTPPVLDSDGSFFLYSKLTVDKSRWQQGNVFSCSVMHEAASFHYTQKSLSLSPGK

SEQ ID NO: 19 - protein, 227 aa, Artificial Sequence
  Amino acid sequence of Fc variant designated as SEQ ID NO. 19 in description
DKTHTCPPCPAPELLGGPSVFLFPPKPKDTLMISRTPEVTCVVVDVSHEDPEVKFNWYVDGVEVHNAKTKPREEQYNSTYRVVSVLTVLHQDWLNGKEYKCKVSNKALPAPIEKTISKAKGQPREPQVYTLPPSRDELTKNQVSLTCLVKGFYPSDIAVEWESNGQPENNYKTTPPVLDSDGSFFLYSKLTVDKSRWQQGNVFSCSVMHEALPWHYTQKSLSLSPGK

SEQ ID NO: 20 - protein, 227 aa, Artificial Sequence
  Amino acid sequence of Fc variant designated as SEQ ID NO. 20 in description
DKTHTCPPCPAPELLGGPSVFLFPPKPKDTLMISRTPEVTCVVVDVSHEDPEVKFNWYVDGVEVHNAKTKPREEQYNSTYRVVSVLTVLHQDWLNGKEYKCKVSNKALPAPIEKTISKAKGQPREPQVYTLPPSRDELTKNQVSLTCLVKGFYPSDIAVEWESNGQPENNYKTTPPVLDSDGSFFLYSKLTVDKSRWQQGNVFSCSVMHEAMPFHYTQKSLSLSPGK

SEQ ID NO: 21 - protein, 227 aa, Artificial Sequence
  Amino acid sequence of Fc variant designated as SEQ ID NO. 21 in description
DKTHTCPPCPAPELLGGPSVFLFPPKPKDTLMISRTPEVTCVVVDVSHEDPEVKFNWYVDGVEVHNAKTKPREEQYNSTYRVVSVLTVLHQDWLNGKEYKCKVSNKALPAPIEKTISKAKGQPREPQVYTLPPSRDELTKNQVSLTCLVKGFYPSDIAVEWESNGQPENNYKTTPPVLDSDGSFFLYSKLTVDKSRWQQGNVFSCSVMHEAAKFHYTQKSLSLSPGK

SEQ ID NO: 22 - protein, 227 aa, Artificial Sequence
  Amino acid sequence of Fc variant designated as SEQ ID NO. 22 in description
DKTHTCPPCPAPELLGGPSVFLFPPKPKDTLMISRTPEVTCVVVDVSHEDPEVKFNWYVDGVEVHNAKTKPREEQYNSTYRVVSVLNPYHQDWLNGKEYKCKVSNKALPAPIEKTISKAKGQPREPQVYTLPPSRDELTKNQVSLTCLVKGFYPSDIAVEWESNGQPENNYKTTPPVLDSDGSFFLYSKLTVDKSRWQQGNVFSCSVMHEALRWHYTQKSLSLSPGK

SEQ ID NO: 23 - protein, 227 aa, Artificial Sequence
  Amino acid sequence of Fc variant designated as SEQ ID NO. 23 in description
DKTHTCPPCPAPELLGGPSVFLFPPKPKDTLMISRTPEVTCVVVDVSHEDPEVKFNWYVDGVEVHNAKTKPREEQYNSTYRVVSVLNPYHQDWLNGKEYKCKVSNKALPAPIEKTISKAKGQPREPQVYTLPPSRDELTKNQVSLTCLVKGFYPSDIAVEWESNGQPENNYKTTPPVLDSDGSFFLYSKLTVDKSRWQQGNVFSCSVMHEASTYHYTQKSLSLSPGK

SEQ ID NO: 24 - protein, 227 aa, Artificial Sequence
  Amino acid sequence of Fc variant designated as SEQ ID NO. 24 in description
DKTHTCPPCPAPELLGGPSVFLFPPKPKDTLMISRTPEVTCVVVDVSHEDPEVKFNWYVDGVEVHNAKTKPREEQYNSTYRVVSVLNPYHQDWLNGKEYKCKVSNKALPAPIEKTISKAKGQPREPQVYTLPPSRDELTKNQVSLTCLVKGFYPSDIAVEWESNGQPENNYKTTPPVLDSDGSFFLYSKLTVDKSRWQQGNVFSCSVMHEALRYHYTQKSLSLSPGK

SEQ ID NO: 25 - protein, 227 aa, Artificial Sequence
  Amino acid sequence of Fc variant designated as SEQ ID NO. 25 in description
DKTHTCPPCPAPELLGGPSVFLFPPKPKDQHLPSRTPEVTCVVVDVSHEDPEVKFNWYVDGVEVHNAKTKPREEQYNSTYRVVSVLTVLHQDWLNGKEYKCKVSNKALPAPIEKTISKAKGQPREPQVYTLPPSRDELTKNQVSLTCLVKGFYPSDIAVEWESNGQPENNYKTTPPVLDSDGSFFLYSKLTVDKSRWQQGNVFSCSVMHEALTHQYTQKSLSLSPGK

SEQ ID NO: 26 - protein, 227 aa, Artificial Sequence
  Amino acid sequence of Fc variant designated as SEQ ID NO. 26 in description
DKTHTCPPCPAPELLGGPSVFLFPPKPKDTLMISRTPEVTCVVVDVSHEDPEVKFNWYVDGVEVHNAKTKPREEQYNSTYRVVSVLTVLHQDWLNGKEYKCKVSNKALPAPIEKTISKAKGQPREPQVYTLPPSRDELTKNQVSLTCLVKGFYPRDLAVEWESNGQPENNYKTTPPVLDSDGSFFLYSKLTVDKSRWQQGNVFSCSVMHEACKFHYTQKSLSLSPGK

SEQ ID NO: 27 - protein, 227 aa, Artificial Sequence
  Amino acid sequence of Fc variant designated as SEQ ID NO. 27 in description
DKTHTCPPCPAPELLGGPSVFLFPPKPKDTLMISRTPEVTCVVVDVSHEDPEVKFNWYVDGVEVHNAKTKPREEQYNSTYRVVSVLNPYHQDWLNGKEYKCKVSNKALPAPIEKTISKAKGQPREPQVYTLPPSRDELTKNQVSLTCLVKGFYPSDIAIQQESNGQPENNYKTTPPVLDSDGSFFLYSKLTVDKSRWQQGNVFSCSVMHEALRWHYTQKSLSLSPGK

SEQ ID NO: 28 - protein, 227 aa, Artificial Sequence
  Amino acid sequence of Fc variant designated as SEQ ID NO. 28 in description
DKTHTCPPCPAPELLGGPSVFLFPPKPKDTLMISRTPEVTCVVVDVSHEDPEVKFNWYVDGVEVHNAKTKPREEQYNSTYRVVSVLYDLHQDWLNGKEYKCKVSNKALPAPIEKTISKAKGQPREPQVYTLPPSRDELTKNQVSLTCLVKGFYPSDIAVEWESNGQPENNYKTTPPVLDSDGSFFLYSKLTVDKSRWQQGNVFSCSVMHEALHNHYTQKSLSLSPGK

SEQ ID NO: 29 - protein, 227 aa, Artificial Sequence
  Amino acid sequence of Fc variant designated as SEQ ID NO. 29 in description
DKTHTCPPCPAPELLGGPSVFLFPPKPKDALMISRTPEVTCVVVDVSHEDPEVKFNWYVDGVEVHNAKTKPREEQYNSTYRVVSVLYDLHQDWLNGKEYKCKVSNKALPAPIEKTISKAKGQPREPQVYTLPPSRDELTKNQVSLTCLVKGFYPSDIAVEWESNGQPENNYKTTPPVLDSDGSFFLYSKLTVDKSRWQQGNVFSCSVMHEALHNHYTQKSLSLSPGK

SEQ ID NO: 30 - protein, 227 aa, Artificial Sequence
  Amino acid sequence of Fc variant designated as SEQ ID NO. 30 in description
DKTHTCPPCPAPELLGGPSVFLFPPKPKDHEQQSRTPEVTCVVVDVSHEDPEVKFNWYVDGVEVHNAKTKPREEQYNSTYRVVSVLTVLHQDWLNGKEYKCKVSNKALPAPIEKTISKAKGQPREPQVYTLPPSRDELTKNQVSLTCLVKGFYPSDIAVEWESNGQPENNYKTTPPVLDSDGSFFLYSKLTVDKSRWQQGNVFSCSVMHEALHNHYTQKSLSLSPGK

SEQ ID NO: 31 - protein, 227 aa, Artificial Sequence
  Amino acid sequence of Fc variant designated as SEQ ID NO. 31 in description
DKTHTCPPCPAPELLGGPSVFLFPPKPKDAQYRSRTPEVTCVVVDVSHEDPEVKFNWYVDGVEVHNAKTKPREEQYNSTYRVVSVLTVLHQDWLNGKEYKCKVSNKALPAPIEKTISKAKGQPREPQVYTLPPSRDELTKNQVSLTCLVKGFYPSDIAVEWESNGQPENNYKTTPPVLDSDGSFFLYSKLTVDKSRWQQGNVFSCSVMHEALHNHYTQKSLSLSPGK

SEQ ID NO: 32 - protein, 227 aa, Artificial Sequence
  Amino acid sequence of Fc variant designated as SEQ ID NO. 32 in description
DKTHTCPPCPAPELLGGPSVFLFPPKPKDARHTSRTPEVTCVVVDVSHEDPEVKFNWYVDGVEVHNAKTKPREEQYNSTYRVVSVLTVLHQDWLNGKEYKCKVSNKALPAPIEKTISKAKGQPREPQVYTLPPSRDELTKNQVSLTCLVKGFYPSDIAVEWESNGQPENNYKTTPPVLDSDGSFFLYSKLTVDKSRWQQGNVFSCSVMHEALHNHYTQKSLSLSPGK

SEQ ID NO: 33 - protein, 227 aa, Artificial Sequence
  Amino acid sequence of Fc variant designated as SEQ ID NO. 33 in description
DKTHTCPPCPAPELLGGPSVFLFPPKPKDVYQISRTPEVTCVVVDVSHEDPEVKFNWYVDGVEVHNAKTKPREEQYNSTYRVVSVLTVLHQDWLNGKEYKCKVSNKALPAPIEKTISKAKGQPREPQVYTLPPSRDELTKNQVSLTCLVKGFYPSDIAVEWESNGQPENNYKTTPPVLDSDGSFFLYSKLTVDKSRWQQGNVFSCSVMHEALHNHYTQKSLSLSPGK

SEQ ID NO: 34 - protein, 227 aa, Artificial Sequence
  Amino acid sequence of Fc variant designated as SEQ ID NO. 34 in description
DKTHTCPPCPAPELLGGPSVFLFPPKPKDKCQNSRTPEVTCVVVDVSHEDPEVKFNWYVDGVEVHNAKTKPREEQYNSTYRVVSVLTVLHQDWLNGKEYKCKVSNKALPAPIEKTISKAKGQPREPQVYTLPPSRDELTKNQVSLTCLVKGFYPSDIAVEWESNGQPENNYKTTPPVLDSDGSFFLYSKLTVDKSRWQQGNVFSCSVMHEALHNHYTQKSLSLSPGK

SEQ ID NO: 35 - protein, 227 aa, Artificial Sequence
  Amino acid sequence of Fc variant designated as SEQ ID NO. 35 in description
DKTHTCPPCPAPELLGGPSVFLFPPKPKDTVFPSRTPEVTCVVVDVSHEDPEVKFNWYVDGVEVHNAKTKPREEQYNSTYRVVSVLTVLHQDWLNGKEYKCKVSNKALPAPIEKTISKAKGQPREPQVYTLPPSRDELTKNQVSLTCLVKGFYPSDIAVEWESNGQPENNYKTTPPVLDSDGSFFLYSKLTVDKSRWQQGNVFSCSVMHEALHNHYTQKSLSLSPGK

SEQ ID NO: 36 - protein, 227 aa, Artificial Sequence
  Amino acid sequence of Fc variant designated as SEQ ID NO. 36 in description
DKTHTCPPCPAPELLGGPSVFLFPPKPKDTLMISRQQYRTCVVVDVSHEDPEVKFNWYVDGVEVHNAKTKPREEQYNSTYRVVSVLTVLHQDWLNGKEYKCKVSNKALPAPIEKTISKAKGQPREPQVYTLPPSRDELTKNQVSLTCLVKGFYPSDIAVEWESNGQPENNYKTTPPVLDSDGSFFLYSKLTVDKSRWQQGNVFSCSVMHEALHNHYTQKSLSLSPGK

SEQ ID NO: 37 - protein, 227 aa, Artificial Sequence
  Amino acid sequence of Fc variant designated as SEQ ID NO. 37 in description
DKTHTCPPCPAPELLGGPSVFLFPPKPKDTLMISRTPWGTCVVVDVSHEDPEVKFNWYVDGVEVHNAKTKPREEQYNSTYRVVSVLTVLHQDWLNGKEYKCKVSNKALPAPIEKTISKAKGQPREPQVYTLPPSRDELTKNQVSLTCLVKGFYPSDIAVEWESNGQPENNYKTTPPVLDSDGSFFLYSKLTVDKSRWQQGNVFSCSVMHEALHNHYTQKSLSLSPGK

SEQ ID NO: 38 - protein, 227 aa, Artificial Sequence
  Amino acid sequence of Fc variant designated as SEQ ID NO. 38 in description
DKTHTCPPCPAPELLGGPSVFLFPPKPKDTLMYHQTPEVTCVVVDVSHEDPEVKFNWYVDGVEVHNAKTKPREEQYNSTYRVVSVLTVLHQDWLNGKEYKCKVSNKALPAPIEKTISKAKGQPREPQVYTLPPSRDELTKNQVSLTCLVKGFYPSDIAVEWESNGQPENNYKTTPPVLDSDGSFFLYSKLTVDKSRWQQGNVFSCSVMHEALHNHYTQKSLSLSPGK

SEQ ID NO: 39 - protein, 227 aa, Artificial Sequence
  Amino acid sequence of Fc variant designated as SEQ ID NO. 39 in description
DKTHTCPPCPAPELLGGPSVFLFPPKPKDTLMISRTPEVTCVVVDVSHEDPEVKFNWYVDGVEVHNAKTKPREEQYNSTYRVVSVLQTSHQDWLNGKEYKCKVSNKALPAPIEKTISKAKGQPREPQVYTLPPSRDELTKNQVSLTCLVKGFYPSDIAVEWESNGQPENNYKTTPPVLDSDGSFFLYSKLTVDKSRWQQGNVFSCSVMHEALHNHYTQKSLSLSPGK

SEQ ID NO: 40 - protein, 227 aa, Artificial Sequence
  Amino acid sequence of Fc variant designated as SEQ ID NO. 40 in description
DKTHTCPPCPAPELLGGPSVFLFPPKPKDTLMISRTPEVTCVVVDVSHEDPEVKFNWYVDGVEVHNAKTKPREEQYNSTYRVVSVLTVTPHDWLNGKEYKCKVSNKALPAPIEKTISKAKGQPREPQVYTLPPSRDELTKNQVSLTCLVKGFYPSDIAVEWESNGQPENNYKTTPPVLDSDGSFFLYSKLTVDKSRWQQGNVFSCSVMHEALHNHYTQKSLSLSPGK

SEQ ID NO: 41 - protein, 227 aa, Artificial Sequence
  Amino acid sequence of Fc variant designated as SEQ ID NO. 41 in description
DKTHTCPPCPAPELLGGPSVFLFPPKPKDTLMISRTPEVTCVVVDVSHEDPEVKFNWYVDGVEVHNAKTKPREEQYNSTYRVVSVLTSQVNDWLNGKEYKCKVSNKALPAPIEKTISKAKGQPREPQVYTLPPSRDELTKNQVSLTCLVKGFYPSDIAVEWESNGQPENNYKTTPPVLDSDGSFFLYSKLTVDKSRWQQGNVFSCSVMHEALHNHYTQKSLSLSPGK

SEQ ID NO: 42 - protein, 227 aa, Artificial Sequence
  Amino acid sequence of Fc variant designated as SEQ ID NO. 42 in description
DKTHTCPPCPAPELLGGPSVFLFPPKPKDTLMISRTPEVTCVVVDVSHEDPEVKFNWYVDGVEVHNAKTKPREEQYNSTYRVVSVLTVLHQDWLNGKEYKCKVSNKALPAPIEKTISKAKGQPREPQVYTLPPSRDELTKNQVSLTCLVKGFYPSDIAVEWESNGQPENNYKTTPPVLDSDGSFFLYSKLTVDKSRWQQGNVFSCSVMHEAMPIPYTQKSLSLSPGK

SEQ ID NO: 43 - protein, 227 aa, Artificial Sequence
  Amino acid sequence of Fc variant designated as SEQ ID NO. 43 in description
DKTHTCPPCPAPELLGGPSVFLFPPKPKDTLMISRTPEVTCVVVDVSHEDPEVKFNWYVDGVEVHNAKTKPREEQYNSTYRVVSVLTVLHQDWLNGKEYKCKVSNKALPAPIEKTISKAKGQPREPQVYTLPPSRDELTKNQVSLTCLVKGFYPSDIAVEWESNGQPENNYKTTPPVLDSDGSFFLYSKLTVDKSRWQQGNVFSCSVMHEAQNNNYTQKSLSLSPGK

SEQ ID NO: 44 - protein, 227 aa, Artificial Sequence
  Amino acid sequence of Fc variant designated as SEQ ID NO. 44 in description
DKTHTCPPCPAPELLGGPSVFLFPPKPKDTLMISRTPEVTCVVVDVSHEDPEVKFNWYVDGVEVHNAKTKPREEQYNSTYRVVSVLTVLHQDWLNGKEYKCKVSNKALPAPIEKTISKAKGQPREPQVYTLPPSRDELTKNQVSLTCLVKGFYPSDIAVEWESNGQPENNYKTTPPVLDSDGSFFLYSKLTVDKSRWQQGNVFSCSVMHEAYRLPYTQKSLSLSPGK

SEQ ID NO: 45 - protein, 227 aa, Artificial Sequence
  Amino acid sequence of Fc variant designated as SEQ ID NO. 45 in description
DKTHTCPPCPAPELLGGPSVFLFPPKPKDTLMISRTPEVTCVVVDVSHEDPEVKFNWYVDGVEVHNAKTKPREEQYNSTYRVVSVLTVLHQDWLNGKEYKCKVSNKALPAPIEKTISKAKGQPREPQVYTLPPSRDELTKNQVSLTCLVKGFYPSDIAVEWESNGQPENNYKTTPPVLDSDGSFFLYSKLTVDKSRWQQGNVFSCSVMHEALHTDFNQKSLSLSPGK

SEQ ID NO: 46 - protein, 227 aa, Artificial Sequence
  Amino acid sequence of Fc variant designated as SEQ ID NO. 46 in description
DKTHTCPPCPAPELLGGPSVFLFPPKPKDTLMISRTPEVTCVVVDVSHEDPEVKFNWYVDGVEVHNAKTKPREEQYNSTYRVVSVLTVLHQDWLNGKEYKCKVSNKALPAPIEKTISKAKGQPREPQVYTLPPSRDELTKNQVSLTCLVKGFYPSDIAVEWESNGQPENNYKTTPPVLDSDGSFFLYSKLTVDKSRWQQGNVFSCSVMHEAPMQHYTQKSLSLSPGK

SEQ ID NO: 47 - protein, 227 aa, Artificial Sequence
  Amino acid sequence of Fc variant designated as SEQ ID NO. 47 in description
DKTHTCPPCPAPELLGGPSVFLFPPKPKDTLMISRTPEVTCVVVDVSHEDPEVKFNWYVDGVEVHNAKTKPREEQYNSTYRVVSVLTSQVNDWLNGKEYKCKVSNKALPAPIEKTISKAKGQPREPQVYTLPPSRDELTKNQVSLTCLVKGFYPSDIAVEWESNGQPENNYKTTPPVLDSDGSFFLYSKLTVDKSRWQQGNVFSCSVMHEAQNNNYTQKSLSLSPGK

SEQ ID NO: 48 - protein, 227 aa, Artificial Sequence
  Amino acid sequence of Fc variant designated as SEQ ID NO. 48 in description
DKTHTCPPCPAPELLGGPSVFLFPPKPKDAQYRSRTPEVTCVVVDVSHEDPEVKFNWYVDGVEVHNAKTKPREEQYNSTYRVVSVLTVLHQDWLNGKEYKCKVSNKALPAPIEKTISKAKGQPREPQVYTLPPSRDELTKNQVSLTCLVKGFYPSDIAVEWESNGQPENNYKTTPPVLDSDGSFFLYSKLTVDKSRWQQGNVFSCSVMHEAYRLPYTQKSLSLSPGK

SEQ ID NO: 49 - protein, 227 aa, Artificial Sequence
  Amino acid sequence of Fc variant designated as SEQ ID NO. 49 in description
DKTHTCPPCPAPELLGGPSVFLFPPKPKDTLMISRTPWGTCVVVDVSHEDPEVKFNWYVDGVEVHNAKTKPREEQYNSTYRVVSVLTVLHQDWLNGKEYKCKVSNKALPAPIEKTISKAKGQPREPQVYTLPPSRDELTKNQVSLTCLVKGFYPSDIAVEWESNGQPENNYKTTPPVLDSDGSFFLYSKLTVDKSRWQQGNVFSCSVMHEALHTDFNQKSLSLSPGK

SEQ ID NO: 50 - protein, 227 aa, Artificial Sequence
  Amino acid sequence of Fc variant designated as SEQ ID NO. 50 in description
DKTHTCPPCPAPELLGGPSVFLFPPKPKDTLMISRTPEVTCVVVDVSHEDPEVKFNWYVDGVEVHNAKTKPREEQYNSTYRVVSVLTVLHQDWLNGKEYKCKVSNKALPAPIEKTISKAKGQPREPQVYTLPPSRDELTKNQVSLTCLVKGFYPSDIAIQQESNGQPENNYKTTPPVLDSDGSFFLYSKLTVDKSRWQQGNVFSCSVMHEALRWHYTQKSLSLSPGK

SEQ ID NO: 51 - protein, 227 aa, Artificial Sequence
  Amino acid sequence of Fc variant designated as SEQ ID NO. 51 in description
DKTHTCPPCPAPELLGGPSVFLFPPKPKDRAVSSRTPEVTCVVVDVSHEDPEVKFNWYVDGVEVHNAKTKPREEQYNSTYRVVSVLTVLHQDWLNGKEYKCKVSNKALPAPIEKTISKAKGQPREPQVYTLPPSRDELTKNQVSLTCLVKGFYPSDIAVEWESNGQPENNYKTTPPVLDSDGSFFLYSKLTVDKSRWQQGNVFSCSVMHEALRWHYTQKSLSLSPGK

SEQ ID NO: 52 - protein, 227 aa, Artificial Sequence
  Amino acid sequence of Fc variant designated as SEQ ID NO. 52 in description
DKTHTCPPCPAPELLGGPSVFLFPPKPKDALMISRTPEVTCVVVDVSHEDPEVKFNWYVDGVEVHNAKTKPREEQYNSTYRVVSVLYDLHQDWLNGKEYKCKVSNKALPAPIEKTISKAKGQPREPQVYTLPPSRDELTKNQVSLTCLVKGFYPSDIAVEWESNGQPENNYKTTPPVLDSDGSFFLYSKLTVDKSRWQQGNVFSCSVMHEALRWHYTQKSLSLSPGK

SEQ ID NO: 53 - protein, 227 aa, Artificial Sequence
  Amino acid sequence of Fc variant designated as SEQ ID NO. 53 in description
DKTHTCPPCPAPELLGGPSVFLFPPKPKDTLMISRTPEVTCVVVDVSHEDPEVKFNWYVDGVEVHNAKTKPREEQYNSTYRVVSVLQTSHQDWLNGKEYKCKVSNKALPAPIEKTISKAKGQPREPQVYTLPPSRDELTKNQVSLTCLVKGFYPSDIAVEWESNGQPENNYKTTPPVLDSDGSFFLYSKLTVDKSRWQQGNVFSCSVMHEALRWHYTQKSLSLSPGK

SEQ ID NO: 54 - protein, 227 aa, Artificial Sequence
  Amino acid sequence of Fc variant designated as SEQ ID NO. 54 in description
DKTHTCPPCPAPELLGGPSVFLFPPKPKDTLMISRQQYRTCVVVDVSHEDPEVKFNWYVDGVEVHNAKTKPREEQYNSTYRVVSVLTVLHQDWLNGKEYKCKVSNKALPAPIEKTISKAKGQPREPQVYTLPPSRDELTKNQVSLTCLVKGFYPSDIAVEWESNGQPENNYKTTPPVLDSDGSFFLYSKLTVDKSRWQQGNVFSCSVMHEALRWHYTQKSLSLSPGK

SEQ ID NO: 55 - protein, 227 aa, Artificial Sequence
  Amino acid sequence of Fc variant designated as SEQ ID NO. 55 in description
DKTHTCPPCPAPELLGGPSVFLFPPKPKDHEQQSRTPEVTCVVVDVSHEDPEVKFNWYVDGVEVHNAKTKPREEQYNSTYRVVSVLTVLHQDWLNGKEYKCKVSNKALPAPIEKTISKAKGQPREPQVYTLPPSRDELTKNQVSLTCLVKGFYPSDIAVEWESNGQPENNYKTTPPVLDSDGSFFLYSKLTVDKSRWQQGNVFSCSVMHEALRWHYTQKSLSLSPGK

SEQ ID NO: 56 - protein, 227 aa, Artificial Sequence
  Amino acid sequence of Fc variant designated as SEQ ID NO. 56 in description
DKTHTCPPCPAPELLGGPSVFLFPPKPKDTLMISRTPEVTCVVVDVSHEDPEVKFNWYVDGVEVHNAKTKPREEQYNSTYRVVSVLTVTPHDWLNGKEYKCKVSNKALPAPIEKTISKAKGQPREPQVYTLPPSRDELTKNQVSLTCLVKGFYPSDIAVEWESNGQPENNYKTTPPVLDSDGSFFLYSKLTVDKSRWQQGNVFSCSVMHEALRWHYTQKSLSLSPGK

SEQ ID NO: 57 - protein, 227 aa, Artificial Sequence
  Amino acid sequence of Fc variant designated as SEQ ID NO. 57 in description
DKTHTCPPCPAPELLGGPSVFLFPPKPKDARHTSRTPEVTCVVVDVSHEDPEVKFNWYVDGVEVHNAKTKPREEQYNSTYRVVSVLTVLHQDWLNGKEYKCKVSNKALPAPIEKTISKAKGQPREPQVYTLPPSRDELTKNQVSLTCLVKGFYPSDIAVEWESNGQPENNYKTTPPVLDSDGSFFLYSKLTVDKSRWQQGNVFSCSVMHEALRWHYTQKSLSLSPGK

SEQ ID NO: 58 - protein, 227 aa, Artificial Sequence
  Amino acid sequence of Fc variant designated as SEQ ID NO. 58 in description
DKTHTCPPCPAPELLGGPSVFLFPPKPKDVYQISRTPEVTCVVVDVSHEDPEVKFNWYVDGVEVHNAKTKPREEQYNSTYRVVSVLTVLHQDWLNGKEYKCKVSNKALPAPIEKTISKAKGQPREPQVYTLPPSRDELTKNQVSLTCLVKGFYPSDIAVEWESNGQPENNYKTTPPVLDSDGSFFLYSKLTVDKSRWQQGNVFSCSVMHEALRWHYTQKSLSLSPGK

SEQ ID NO: 59 - protein, 227 aa, Artificial Sequence
  Amino acid sequence of Fc variant designated as SEQ ID NO. 59 in description
DKTHTCPPCPAPELLGGPSVFLFPPKPKDKCQNSRTPEVTCVVVDVSHEDPEVKFNWYVDGVEVHNAKTKPREEQYNSTYRVVSVLTVLHQDWLNGKEYKCKVSNKALPAPIEKTISKAKGQPREPQVYTLPPSRDELTKNQVSLTCLVKGFYPSDIAVEWESNGQPENNYKTTPPVLDSDGSFFLYSKLTVDKSRWQQGNVFSCSVMHEALRWHYTQKSLSLSPGK

SEQ ID NO: 60 - protein, 227 aa, Artificial Sequence
  Amino acid sequence of Fc variant designated as SEQ ID NO. 60 in description
DKTHTCPPCPAPELLGGPSVFLFPPKPKDTLMYHQTPEVTCVVVDVSHEDPEVKFNWYVDGVEVHNAKTKPREEQYNSTYRVVSVLTVLHQDWLNGKEYKCKVSNKALPAPIEKTISKAKGQPREPQVYTLPPSRDELTKNQVSLTCLVKGFYPSDIAVEWESNGQPENNYKTTPPVLDSDGSFFLYSKLTVDKSRWQQGNVFSCSVMHEALRWHYTQKSLSLSPGK

SEQ ID NO: 61 - protein, 227 aa, Artificial Sequence
  Amino acid sequence of Fc variant designated as SEQ ID NO. 61 in description
DKTHTCPPCPAPELLGGPSVFLFPPKPKDTVFPSRTPEVTCVVVDVSHEDPEVKFNWYVDGVEVHNAKTKPREEQYNSTYRVVSVLTVLHQDWLNGKEYKCKVSNKALPAPIEKTISKAKGQPREPQVYTLPPSRDELTKNQVSLTCLVKGFYPSDIAVEWESNGQPENNYKTTPPVLDSDGSFFLYSKLTVDKSRWQQGNVFSCSVMHEALRWHYTQKSLSLSPGK

SEQ ID NO: 62 - protein, 227 aa, Artificial Sequence
  Amino acid sequence of Fc variant designated as SEQ ID NO. 62 in description
DKTHTCPPCPAPELLGGPSVFLFPPKPKDTLMISRTPEVTCVVVDVSHEDPEVKFNWYVDGVEVHNAKTKPREEQYNSTYRVVSVLTVLHQDWLNGKEYKCKVSNKALPAPIEKTISKAKGQPREPQVYTLPPSRDELTKNQVSLTCLVKGFYPSDIAIQQESNGQPENNYKTTPPVLDSDGSFFLYSKLTVDKSRWQQGNVFSCSVMHEASTYHYTQKSLSLSPGK

SEQ ID NO: 63 - protein, 227 aa, Artificial Sequence
  Amino acid sequence of Fc variant designated as SEQ ID NO. 63 in description
DKTHTCPPCPAPELLGGPSVFLFPPKPKDRAVSSRTPEVTCVVVDVSHEDPEVKFNWYVDGVEVHNAKTKPREEQYNSTYRVVSVLTVLHQDWLNGKEYKCKVSNKALPAPIEKTISKAKGQPREPQVYTLPPSRDELTKNQVSLTCLVKGFYPSDIAVEWESNGQPENNYKTTPPVLDSDGSFFLYSKLTVDKSRWQQGNVFSCSVMHEASTYHYTQKSLSLSPGK

SEQ ID NO: 64 - protein, 227 aa, Artificial Sequence
  Amino acid sequence of Fc variant designated as SEQ ID NO. 64 in description
DKTHTCPPCPAPELLGGPSVFLFPPKPKDALMISRTPEVTCVVVDVSHEDPEVKFNWYVDGVEVHNAKTKPREEQYNSTYRVVSVLYDLHQDWLNGKEYKCKVSNKALPAPIEKTISKAKGQPREPQVYTLPPSRDELTKNQVSLTCLVKGFYPSDIAVEWESNGQPENNYKTTPPVLDSDGSFFLYSKLTVDKSRWQQGNVFSCSVMHEASTYHYTQKSLSLSPGK

SEQ ID NO: 65 - protein, 227 aa, Artificial Sequence
  Amino acid sequence of Fc variant designated as SEQ ID NO. 65 in description
DKTHTCPPCPAPELLGGPSVFLFPPKPKDTLMISRTPEVTCVVVDVSHEDPEVKFNWYVDGVEVHNAKTKPREEQYNSTYRVVSVLQTSHQDWLNGKEYKCKVSNKALPAPIEKTISKAKGQPREPQVYTLPPSRDELTKNQVSLTCLVKGFYPSDIAVEWESNGQPENNYKTTPPVLDSDGSFFLYSKLTVDKSRWQQGNVFSCSVMHEASTYHYTQKSLSLSPGK

SEQ ID NO: 66 - protein, 227 aa, Artificial Sequence
  Amino acid sequence of Fc variant designated as SEQ ID NO. 66 in description
DKTHTCPPCPAPELLGGPSVFLFPPKPKDTLMISRQQYRTCVVVDVSHEDPEVKFNWYVDGVEVHNAKTKPREEQYNSTYRVVSVLTVLHQDWLNGKEYKCKVSNKALPAPIEKTISKAKGQPREPQVYTLPPSRDELTKNQVSLTCLVKGFYPSDIAVEWESNGQPENNYKTTPPVLDSDGSFFLYSKLTVDKSRWQQGNVFSCSVMHEASTYHYTQKSLSLSPGK

SEQ ID NO: 67 - protein, 227 aa, Artificial Sequence
  Amino acid sequence of Fc variant designated as SEQ ID NO. 67 in description
DKTHTCPPCPAPELLGGPSVFLFPPKPKDHEQQSRTPEVTCVVVDVSHEDPEVKFNWYVDGVEVHNAKTKPREEQYNSTYRVVSVLTVLHQDWLNGKEYKCKVSNKALPAPIEKTISKAKGQPREPQVYTLPPSRDELTKNQVSLTCLVKGFYPSDIAVEWESNGQPENNYKTTPPVLDSDGSFFLYSKLTVDKSRWQQGNVFSCSVMHEASTYHYTQKSLSLSPGK

SEQ ID NO: 68 - protein, 227 aa, Artificial Sequence
  Amino acid sequence of Fc variant designated as SEQ ID NO. 68 in description
DKTHTCPPCPAPELLGGPSVFLFPPKPKDTLMISRTPEVTCVVVDVSHEDPEVKFNWYVDGVEVHNAKTKPREEQYNSTYRVVSVLTVTPHDWLNGKEYKCKVSNKALPAPIEKTISKAKGQPREPQVYTLPPSRDELTKNQVSLTCLVKGFYPSDIAVEWESNGQPENNYKTTPPVLDSDGSFFLYSKLTVDKSRWQQGNVFSCSVMHEASTYHYTQKSLSLSPGK

SEQ ID NO: 69 - protein, 227 aa, Artificial Sequence
  Amino acid sequence of Fc variant designated as SEQ ID NO. 69 in description
DKTHTCPPCPAPELLGGPSVFLFPPKPKDARHTSRTPEVTCVVVDVSHEDPEVKFNWYVDGVEVHNAKTKPREEQYNSTYRVVSVLTVLHQDWLNGKEYKCKVSNKALPAPIEKTISKAKGQPREPQVYTLPPSRDELTKNQVSLTCLVKGFYPSDIAVEWESNGQPENNYKTTPPVLDSDGSFFLYSKLTVDKSRWQQGNVFSCSVMHEASTYHYTQKSLSLSPGK

SEQ ID NO: 70 - protein, 227 aa, Artificial Sequence
  Amino acid sequence of Fc variant designated as SEQ ID NO. 70 in description
DKTHTCPPCPAPELLGGPSVFLFPPKPKDVYQISRTPEVTCVVVDVSHEDPEVKFNWYVDGVEVHNAKTKPREEQYNSTYRVVSVLTVLHQDWLNGKEYKCKVSNKALPAPIEKTISKAKGQPREPQVYTLPPSRDELTKNQVSLTCLVKGFYPSDIAVEWESNGQPENNYKTTPPVLDSDGSFFLYSKLTVDKSRWQQGNVFSCSVMHEASTYHYTQKSLSLSPGK

SEQ ID NO: 71 - protein, 227 aa, Artificial Sequence
  Amino acid sequence of Fc variant designated as SEQ ID NO. 71 in description
DKTHTCPPCPAPELLGGPSVFLFPPKPKDKCQNSRTPEVTCVVVDVSHEDPEVKFNWYVDGVEVHNAKTKPREEQYNSTYRVVSVLTVLHQDWLNGKEYKCKVSNKALPAPIEKTISKAKGQPREPQVYTLPPSRDELTKNQVSLTCLVKGFYPSDIAVEWESNGQPENNYKTTPPVLDSDGSFFLYSKLTVDKSRWQQGNVFSCSVMHEASTYHYTQKSLSLSPGK

SEQ ID NO: 72 - protein, 227 aa, Artificial Sequence
  Amino acid sequence of Fc variant designated as SEQ ID NO. 72 in description
DKTHTCPPCPAPELLGGPSVFLFPPKPKDTLMYHQTPEVTCVVVDVSHEDPEVKFNWYVDGVEVHNAKTKPREEQYNSTYRVVSVLTVLHQDWLNGKEYKCKVSNKALPAPIEKTISKAKGQPREPQVYTLPPSRDELTKNQVSLTCLVKGFYPSDIAVEWESNGQPENNYKTTPPVLDSDGSFFLYSKLTVDKSRWQQGNVFSCSVMHEASTYHYTQKSLSLSPGK

SEQ ID NO: 73 - protein, 227 aa, Artificial Sequence
  Amino acid sequence of Fc variant designated as SEQ ID NO. 73 in description
DKTHTCPPCPAPELLGGPSVFLFPPKPKDTVFPSRTPEVTCVVVDVSHEDPEVKFNWYVDGVEVHNAKTKPREEQYNSTYRVVSVLTVLHQDWLNGKEYKCKVSNKALPAPIEKTISKAKGQPREPQVYTLPPSRDELTKNQVSLTCLVKGFYPSDIAVEWESNGQPENNYKTTPPVLDSDGSFFLYSKLTVDKSRWQQGNVFSCSVMHEASTYHYTQKSLSLSPGK

SEQ ID NO: 74 - protein, 227 aa, Artificial Sequence
  Amino acid sequence of Fc variant designated as SEQ ID NO. 74 in description
DKTHTCPPCPAPELLGGPSVFLFPPKPKDTLMISRTPEVTCVVVDVSHEDPEVKFNWYVDGVEVHNAKTKPREEQYNSTYRVVSVLTVLHQDWLNGKEYKCKVSNKALPAPIEKTISKAKGQPREPQVYTLPPSRDELTKNQVSLTCLVKGFYPSDIAIQQESNGQPENNYKTTPPVLDSDGSFFLYSKLTVDKSRWQQGNVFSCSVMHEALRYHYTQKSLSLSPGK

SEQ ID NO: 75 - protein, 227 aa, Artificial Sequence
  Amino acid sequence of Fc variant designated as SEQ ID NO. 75 in description
DKTHTCPPCPAPELLGGPSVFLFPPKPKDRAVSSRTPEVTCVVVDVSHEDPEVKFNWYVDGVEVHNAKTKPREEQYNSTYRVVSVLTVLHQDWLNGKEYKCKVSNKALPAPIEKTISKAKGQPREPQVYTLPPSRDELTKNQVSLTCLVKGFYPSDIAVEWESNGQPENNYKTTPPVLDSDGSFFLYSKLTVDKSRWQQGNVFSCSVMHEALRYHYTQKSLSLSPGK

SEQ ID NO: 76 - protein, 227 aa, Artificial Sequence
  Amino acid sequence of Fc variant designated as SEQ ID NO. 76 in description
DKTHTCPPCPAPELLGGPSVFLFPPKPKDALMISRTPEVTCVVVDVSHEDPEVKFNWYVDGVEVHNAKTKPREEQYNSTYRVVSVLYDLHQDWLNGKEYKCKVSNKALPAPIEKTISKAKGQPREPQVYTLPPSRDELTKNQVSLTCLVKGFYPSDIAVEWESNGQPENNYKTTPPVLDSDGSFFLYSKLTVDKSRWQQGNVFSCSVMHEALRYHYTQKSLSLSPGK

SEQ ID NO: 77 - protein, 227 aa, Artificial Sequence
  Amino acid sequence of Fc variant designated as SEQ ID NO. 77 in description
DKTHTCPPCPAPELLGGPSVFLFPPKPKDTLMISRTPEVTCVVVDVSHEDPEVKFNWYVDGVEVHNAKTKPREEQYNSTYRVVSVLQTSHQDWLNGKEYKCKVSNKALPAPIEKTISKAKGQPREPQVYTLPPSRDELTKNQVSLTCLVKGFYPSDIAVEWESNGQPENNYKTTPPVLDSDGSFFLYSKLTVDKSRWQQGNVFSCSVMHEALRYHYTQKSLSLSPGK

SEQ ID NO: 78 - protein, 227 aa, Artificial Sequence
  Amino acid sequence of Fc variant designated as SEQ ID NO. 78 in description
DKTHTCPPCPAPELLGGPSVFLFPPKPKDTLMISRQQYRTCVVVDVSHEDPEVKFNWYVDGVEVHNAKTKPREEQYNSTYRVVSVLTVLHQDWLNGKEYKCKVSNKALPAPIEKTISKAKGQPREPQVYTLPPSRDELTKNQVSLTCLVKGFYPSDIAVEWESNGQPENNYKTTPPVLDSDGSFFLYSKLTVDKSRWQQGNVFSCSVMHEALRYHYTQKSLSLSPGK

SEQ ID NO: 79 - protein, 227 aa, Artificial Sequence
  Amino acid sequence of Fc variant designated as SEQ ID NO. 79 in description
DKTHTCPPCPAPELLGGPSVFLFPPKPKDHEQQSRTPEVTCVVVDVSHEDPEVKFNWYVDGVEVHNAKTKPREEQYNSTYRVVSVLTVLHQDWLNGKEYKCKVSNKALPAPIEKTISKAKGQPREPQVYTLPPSRDELTKNQVSLTCLVKGFYPSDIAVEWESNGQPENNYKTTPPVLDSDGSFFLYSKLTVDKSRWQQGNVFSCSVMHEALRYHYTQKSLSLSPGK

SEQ ID NO: 80 - protein, 227 aa, Artificial Sequence
  Amino acid sequence of Fc variant designated as SEQ ID NO. 80 in description
DKTHTCPPCPAPELLGGPSVFLFPPKPKDTLMISRTPEVTCVVVDVSHEDPEVKFNWYVDGVEVHNAKTKPREEQYNSTYRVVSVLTVTPHDWLNGKEYKCKVSNKALPAPIEKTISKAKGQPREPQVYTLPPSRDELTKNQVSLTCLVKGFYPSDIAVEWESNGQPENNYKTTPPVLDSDGSFFLYSKLTVDKSRWQQGNVFSCSVMHEALRYHYTQKSLSLSPGK

SEQ ID NO: 81 - protein, 227 aa, Artificial Sequence
  Amino acid sequence of Fc variant designated as SEQ ID NO. 81 in description
DKTHTCPPCPAPELLGGPSVFLFPPKPKDARHTSRTPEVTCVVVDVSHEDPEVKFNWYVDGVEVHNAKTKPREEQYNSTYRVVSVLTVLHQDWLNGKEYKCKVSNKALPAPIEKTISKAKGQPREPQVYTLPPSRDELTKNQVSLTCLVKGFYPSDIAVEWESNGQPENNYKTTPPVLDSDGSFFLYSKLTVDKSRWQQGNVFSCSVMHEALRYHYTQKSLSLSPGK

SEQ ID NO: 82 - protein, 227 aa, Artificial Sequence
  Amino acid sequence of Fc variant designated as SEQ ID NO. 82 in description
DKTHTCPPCPAPELLGGPSVFLFPPKPKDVYQISRTPEVTCVVVDVSHEDPEVKFNWYVDGVEVHNAKTKPREEQYNSTYRVVSVLTVLHQDWLNGKEYKCKVSNKALPAPIEKTISKAKGQPREPQVYTLPPSRDELTKNQVSLTCLVKGFYPSDIAVEWESNGQPENNYKTTPPVLDSDGSFFLYSKLTVDKSRWQQGNVFSCSVMHEALRYHYTQKSLSLSPGK

SEQ ID NO: 83 - protein, 227 aa, Artificial Sequence
  Amino acid sequence of Fc variant designated as SEQ ID NO. 83 in description
DKTHTCPPCPAPELLGGPSVFLFPPKPKDKCQNSRTPEVTCVVVDVSHEDPEVKFNWYVDGVEVHNAKTKPREEQYNSTYRVVSVLTVLHQDWLNGKEYKCKVSNKALPAPIEKTISKAKGQPREPQVYTLPPSRDELTKNQVSLTCLVKGFYPSDIAVEWESNGQPENNYKTTPPVLDSDGSFFLYSKLTVDKSRWQQGNVFSCSVMHEALRYHYTQKSLSLSPGK

SEQ ID NO: 84 - protein, 227 aa, Artificial Sequence
  Amino acid sequence of Fc variant designated as SEQ ID NO. 84 in description
DKTHTCPPCPAPELLGGPSVFLFPPKPKDTLMYHQTPEVTCVVVDVSHEDPEVKFNWYVDGVEVHNAKTKPREEQYNSTYRVVSVLTVLHQDWLNGKEYKCKVSNKALPAPIEKTISKAKGQPREPQVYTLPPSRDELTKNQVSLTCLVKGFYPSDIAVEWESNGQPENNYKTTPPVLDSDGSFFLYSKLTVDKSRWQQGNVFSCSVMHEALRYHYTQKSLSLSPGK

SEQ ID NO: 85 - protein, 227 aa, Artificial Sequence
  Amino acid sequence of Fc variant designated as SEQ ID NO. 85 in description
DKTHTCPPCPAPELLGGPSVFLFPPKPKDTVFPSRTPEVTCVVVDVSHEDPEVKFNWYVDGVEVHNAKTKPREEQYNSTYRVVSVLTVLHQDWLNGKEYKCKVSNKALPAPIEKTISKAKGQPREPQVYTLPPSRDELTKNQVSLTCLVKGFYPSDIAVEWESNGQPENNYKTTPPVLDSDGSFFLYSKLTVDKSRWQQGNVFSCSVMHEALRYHYTQKSLSLSPGK

SEQ ID NO: 86 - protein, 227 aa, Artificial Sequence
  Amino acid sequence of Fc variant designated as SEQ ID NO. 86 in description
DKTHTCPPCPAPELLGGPSVFLFPPKPKDQHLPSRTPEVTCVVVDVSHEDPEVKFNWYVDGVEVHNAKTKPREEQYNSTYRVVSVLNPYHQDWLNGKEYKCKVSNKALPAPIEKTISKAKGQPREPQVYTLPPSRDELTKNQVSLTCLVKGFYPSDIAVEWESNGQPENNYKTTPPVLDSDGSFFLYSKLTVDKSRWQQGNVFSCSVMHEALTHQYTQKSLSLSPGK

SEQ ID NO: 87 - protein, 227 aa, Artificial Sequence
  Amino acid sequence of Fc variant designated as SEQ ID NO. 87 in description
DKTHTCPPCPAPELLGGPSVFLFPPKPKDTLMISRTPEVTCVVVDVSHEDPEVKFNWYVDGVEVHNAKTKPREEQYNSTYRVVSVLNPYHQDWLNGKEYKCKVSNKALPAPIEKTISKAKGQPREPQVYTLPPSRDELTKNQVSLTCLVKGFYPSDIAVEWESNGQPENNYKTTPPVLDSDGSFFLYSKLTVDKSRWQQGNVFSCSVMHEALQWHYTQKSLSLSPGK

SEQ ID NO: 88 - protein, 227 aa, Artificial Sequence
  Amino acid sequence of Fc variant designated as SEQ ID NO. 88 in description
DKTHTCPPCPAPELLGGPSVFLFPPKPKDTLMISRTPEVTCVVVDVSHEDPEVKFNWYVDGVEVHNAKTKPREEQYNSTYRVVSVLNPYHQDWLNGKEYKCKVSNKALPAPIEKTISKAKGQPREPQVYTLPPSRDELTKNQVSLTCLVKGFYPSDIAVEWESNGQPENNYKTTPPVLDSDGSFFLYSKLTVDKSRWQQGNVFSCSVMHEALPWKYTQKSLSLSPGK

SEQ ID NO: 89 - protein, 227 aa, Artificial Sequence
  Amino acid sequence of Fc variant designated as SEQ ID NO. 89 in description
DKTHTCPPCPAPELLGGPSVFLFPPKPKDTLMISRTPEVTCVVVDVSHEDPEVKFNWYVDGVEVHNAKTKPREEQYNSTYRVVSVLNPYHQDWLNGKEYKCKVSNKALPAPIEKTISKAKGQPREPQVYTLPPSRDELTKNQVSLTCLVKGFYPSDIAVEWESNGQPENNYKTTPPVLDSDGSFFLYSKLTVDKSRWQQGNVFSCSVMHEALRHKYTQKSLSLSPGK

SEQ ID NO: 90 - protein, 227 aa, Artificial Sequence
  Amino acid sequence of Fc variant designated as SEQ ID NO. 90 in description
DKTHTCPPCPAPELLGGPSVFLFPPKPKDTLMISRTPEVTCVVVDVSHEDPEVKFNWYVDGVEVHNAKTKPREEQYNSTYRVVSVLNPYHQDWLNGKEYKCKVSNKALPAPIEKTISKAKGQPREPQVYTLPPSRDELTKNQVSLTCLVKGFYPRDLAVEWESNGQPENNYKTTPPVLDSDGSFFLYSKLTVDKSRWQQGNVFSCSVMHEACKFHYTQKSLSLSPGK

SEQ ID NO: 91 - protein, 227 aa, Artificial Sequence
  Amino acid sequence of Fc variant designated as SEQ ID NO. 91 in description
DKTHTCPPCPAPELLGGPSVFLFPPKPKDTLMISRTPEVTCVVVDVSHEDPEVKFNWYVDGVEVHNAKTKPREEQYNSTYRVVSVLNPYHQDWLNGKEYKCKVSNKALPAPIEKTISKAKGQPREPQVYTLPPSRDELTKNQVSLTCLVKGFYPSDIAVEWESNGQPENNYKTTPPVLDSDGSFFLYSKLTVDKSRWQQGNVFSCSVMHEAWFDKYTQKSLSLSPGK

SEQ ID NO: 92 - protein, 227 aa, Artificial Sequence
  Amino acid sequence of Fc variant designated as SEQ ID NO. 92 in description
DKTHTCPPCPAPELLGGPSVFLFPPKPKDTLMISRTPEVTCVVVDVSHEDPEVKFNWYVDGVEVHNAKTKPREEQYNSTYRVVSVLNPYHQDWLNGKEYKCKVSNKALPAPIEKTISKAKGQPREPQVYTLPPSRDELTKNQVSLTCLVKGFYPSDIAVEWESNGQPENNYKTTPPVLDSDGSFFLYSKLTVDKSRWQQGNVFSCSVMHEAFSGHYTQKSLSLSPGK

SEQ ID NO: 93 - protein, 227 aa, Artificial Sequence
  Amino acid sequence of Fc variant designated as SEQ ID NO. 93 in description
DKTHTCPPCPAPELLGGPSVFLFPPKPKDTLMISRTPEVTCVVVDVSHEDPEVKFNWYVDGVEVHNAKTKPREEQYNSTYRVVSVLNPYHQDWLNGKEYKCKVSNKALPAPIEKTISKAKGQPREPQVYTLPPSRDELTKNQVSLTCLVKGFYPSDIAIQQESNGQPENNYKTTPPVLDSDGSFFLYSKLTVDKSRWQQGNVFSCSVMHEALHNHYTQKSLSLSPGK

SEQ ID NO: 94 - protein, 227 aa, Artificial Sequence
  Amino acid sequence of Fc variant designated as SEQ ID NO. 94 in description
DKTHTCPPCPAPELLGGPSVFLFPPKPKDRAVSSRTPEVTCVVVDVSHEDPEVKFNWYVDGVEVHNAKTKPREEQYNSTYRVVSVLNPYHQDWLNGKEYKCKVSNKALPAPIEKTISKAKGQPREPQVYTLPPSRDELTKNQVSLTCLVKGFYPSDIAVEWESNGQPENNYKTTPPVLDSDGSFFLYSKLTVDKSRWQQGNVFSCSVMHEALHNHYTQKSLSLSPGK

SEQ ID NO: 95 - protein, 227 aa, Artificial Sequence
  Amino acid sequence of Fc variant designated as SEQ ID NO. 95 in description
DKTHTCPPCPAPELLGGPSVFLFPPKPKDTLMISRTPEVTCVVVDVSHEDPEVKFNWYVDGVEVHNAKTKPREEQYNSTYRVVSVLNPYHQDWLNGKEYKCKVSNKALPAPIEKTISKAKGQPREPQVYTLPPSRDELTKNQVSLTCLVKGFYPSDIAVEWESNGQPENNYKTTPPVLDSDGSFFLYSKLTVDKSRWQQGNVFSCSVMHEALRFHYTQKSLSLSPGK

SEQ ID NO: 96 - protein, 227 aa, Artificial Sequence
  Amino acid sequence of Fc variant designated as SEQ ID NO. 96 in description
DKTHTCPPCPAPELLGGPSVFLFPPKPKDTLMISRTPEVTCVVVDVSHEDPEVKFNWYVDGVEVHNAKTKPREEQYNSTYRVVSVLNPYHQDWLNGKEYKCKVSNKALPAPIEKTISKAKGQPREPQVYTLPPSRDELTKNQVSLTCLVKGFYPSDIAVEWESNGQPENNYKTTPPVLDSDGSFFLYSKLTVDKSRWQQGNVFSCSVMHEALPYHYTQKSLSLSPGK

SEQ ID NO: 97 - protein, 227 aa, Artificial Sequence
  Amino acid sequence of Fc variant designated as SEQ ID NO. 97 in description
DKTHTCPPCPAPELLGGPSVFLFPPKPKDTLMISRTPEVTCVVVDVSHEDPEVKFNWYVDGVEVHNAKTKPREEQYNSTYRVVSVLNPYHQDWLNGKEYKCKVSNKALPAPIEKTISKAKGQPREPQVYTLPPSRDELTKNQVSLTCLVKGFYPSDIAVEWESNGQPENNYKTTPPVLDSDGSFFLYSKLTVDKSRWQQGNVFSCSVMHEAASFHYTQKSLSLSPGK

SEQ ID NO: 98 - protein, 227 aa, Artificial Sequence
  Amino acid sequence of Fc variant designated as SEQ ID NO. 98 in description
DKTHTCPPCPAPELLGGPSVFLFPPKPKDTLMISRTPEVTCVVVDVSHEDPEVKFNWYVDGVEVHNAKTKPREEQYNSTYRVVSVLNPYHQDWLNGKEYKCKVSNKALPAPIEKTISKAKGQPREPQVYTLPPSRDELTKNQVSLTCLVKGFYPSDIAVEWESNGQPENNYKTTPPVLDSDGSFFLYSKLTVDKSRWQQGNVFSCSVMHEALPWHYTQKSLSLSPGK

SEQ ID NO: 99 - protein, 227 aa, Artificial Sequence
  Amino acid sequence of Fc variant designated as SEQ ID NO. 99 in description
DKTHTCPPCPAPELLGGPSVFLFPPKPKDTLMISRTPEVTCVVVDVSHEDPEVKFNWYVDGVEVHNAKTKPREEQYNSTYRVVSVLNPYHQDWLNGKEYKCKVSNKALPAPIEKTISKAKGQPREPQVYTLPPSRDELTKNQVSLTCLVKGFYPSDIAVEWESNGQPENNYKTTPPVLDSDGSFFLYSKLTVDKSRWQQGNVFSCSVMHEAMPFHYTQKSLSLSPGK

SEQ ID NO: 100 - protein, 227 aa, Artificial Sequence
  Amino acid sequence of Fc variant designated as SEQ ID NO. 100 in description
DKTHTCPPCPAPELLGGPSVFLFPPKPKDTLMISRTPEVTCVVVDVSHEDPEVKFNWYVDGVEVHNAKTKPREEQYNSTYRVVSVLNPYHQDWLNGKEYKCKVSNKALPAPIEKTISKAKGQPREPQVYTLPPSRDELTKNQVSLTCLVKGFYPSDIAVEWESNGQPENNYKTTPPVLDSDGSFFLYSKLTVDKSRWQQGNVFSCSVMHEAAKFHYTQKSLSLSPGK

SEQ ID NO: 101 - protein, 227 aa, Artificial Sequence
  Amino acid sequence of Fc variant designated as SEQ ID NO. 101 in description
DKTHTCPPCPAPELLGGPSVFLFPPKPKDTLMISRQQYRTCVVVDVSHEDPEVKFNWYVDGVEVHNAKTKPREEQYNSTYRVVSVLNPYHQDWLNGKEYKCKVSNKALPAPIEKTISKAKGQPREPQVYTLPPSRDELTKNQVSLTCLVKGFYPSDIAVEWESNGQPENNYKTTPPVLDSDGSFFLYSKLTVDKSRWQQGNVFSCSVMHEALHNHYTQKSLSLSPGK

SEQ ID NO: 102 - protein, 227 aa, Artificial Sequence
  Amino acid sequence of Fc variant designated as SEQ ID NO. 102 in description
DKTHTCPPCPAPELLGGPSVFLFPPKPKDHEQQSRTPEVTCVVVDVSHEDPEVKFNWYVDGVEVHNAKTKPREEQYNSTYRVVSVLNPYHQDWLNGKEYKCKVSNKALPAPIEKTISKAKGQPREPQVYTLPPSRDELTKNQVSLTCLVKGFYPSDIAVEWESNGQPENNYKTTPPVLDSDGSFFLYSKLTVDKSRWQQGNVFSCSVMHEALHNHYTQKSLSLSPGK

SEQ ID NO: 103 - protein, 227 aa, Artificial Sequence
  Amino acid sequence of Fc variant designated as SEQ ID NO. 103 in description
DKTHTCPPCPAPELLGGPSVFLFPPKPKDTLMISRTPEVTCVVVDVSHEDPEVKFNWYVDGVEVHNAKTKPREEQYNSTYRVVSVLNPYHQDWLNGKEYKCKVSNKALPAPIEKTISKAKGQPREPQVYTLPPSRDELTKNQVSLTCLVKGFYPSDIAVEWESNGQPENNYKTTPPVLDSDGSFFLYSKLTVDKSRWQQGNVFSCSVMHEAMPIPYTQKSLSLSPGK

SEQ ID NO: 104 - protein, 227 aa, Artificial Sequence
  Amino acid sequence of Fc variant designated as SEQ ID NO. 104 in description
DKTHTCPPCPAPELLGGPSVFLFPPKPKDTLMISRTPEVTCVVVDVSHEDPEVKFNWYVDGVEVHNAKTKPREEQYNSTYRVVSVLNPYHQDWLNGKEYKCKVSNKALPAPIEKTISKAKGQPREPQVYTLPPSRDELTKNQVSLTCLVKGFYPSDIAVEWESNGQPENNYKTTPPVLDSDGSFFLYSKLTVDKSRWQQGNVFSCSVMHEAPMQHYTQKSLSLSPGK

SEQ ID NO: 105 - protein, 227 aa, Artificial Sequence
  Amino acid sequence of Fc variant designated as SEQ ID NO. 105 in description
DKTHTCPPCPAPELLGGPSVFLFPPKPKDAQYRSRTPEVTCVVVDVSHEDPEVKFNWYVDGVEVHNAKTKPREEQYNSTYRVVSVLNPYHQDWLNGKEYKCKVSNKALPAPIEKTISKAKGQPREPQVYTLPPSRDELTKNQVSLTCLVKGFYPSDIAVEWESNGQPENNYKTTPPVLDSDGSFFLYSKLTVDKSRWQQGNVFSCSVMHEAYRLPYTQKSLSLSPGK

SEQ ID NO: 106 - protein, 227 aa, Artificial Sequence
  Amino acid sequence of Fc variant designated as SEQ ID NO. 106 in description
DKTHTCPPCPAPELLGGPSVFLFPPKPKDTLMISRTPWGTCVVVDVSHEDPEVKFNWYVDGVEVHNAKTKPREEQYNSTYRVVSVLNPYHQDWLNGKEYKCKVSNKALPAPIEKTISKAKGQPREPQVYTLPPSRDELTKNQVSLTCLVKGFYPSDIAVEWESNGQPENNYKTTPPVLDSDGSFFLYSKLTVDKSRWQQGNVFSCSVMHEALHTDFNQKSLSLSPGK

SEQ ID NO: 107 - protein, 227 aa, Artificial Sequence
  Amino acid sequence of Fc variant designated as SEQ ID NO. 107 in description
DKTHTCPPCPAPELLGGPSVFLFPPKPKDARHTSRTPEVTCVVVDVSHEDPEVKFNWYVDGVEVHNAKTKPREEQYNSTYRVVSVLNPYHQDWLNGKEYKCKVSNKALPAPIEKTISKAKGQPREPQVYTLPPSRDELTKNQVSLTCLVKGFYPSDIAVEWESNGQPENNYKTTPPVLDSDGSFFLYSKLTVDKSRWQQGNVFSCSVMHEALHNHYTQKSLSLSPGK

SEQ ID NO: 108 - protein, 227 aa, Artificial Sequence
  Amino acid sequence of Fc variant designated as SEQ ID NO. 108 in description
DKTHTCPPCPAPELLGGPSVFLFPPKPKDVYQISRTPEVTCVVVDVSHEDPEVKFNWYVDGVEVHNAKTKPREEQYNSTYRVVSVLNPYHQDWLNGKEYKCKVSNKALPAPIEKTISKAKGQPREPQVYTLPPSRDELTKNQVSLTCLVKGFYPSDIAVEWESNGQPENNYKTTPPVLDSDGSFFLYSKLTVDKSRWQQGNVFSCSVMHEALHNHYTQKSLSLSPGK

SEQ ID NO: 109 - protein, 227 aa, Artificial Sequence
  Amino acid sequence of Fc variant designated as SEQ ID NO. 109 in description
DKTHTCPPCPAPELLGGPSVFLFPPKPKDKCQNSRTPEVTCVVVDVSHEDPEVKFNWYVDGVEVHNAKTKPREEQYNSTYRVVSVLNPYHQDWLNGKEYKCKVSNKALPAPIEKTISKAKGQPREPQVYTLPPSRDELTKNQVSLTCLVKGFYPSDIAVEWESNGQPENNYKTTPPVLDSDGSFFLYSKLTVDKSRWQQGNVFSCSVMHEALHNHYTQKSLSLSPGK

SEQ ID NO: 110 - protein, 227 aa, Artificial Sequence
  Amino acid sequence of Fc variant designated as SEQ ID NO. 110 in description
DKTHTCPPCPAPELLGGPSVFLFPPKPKDTLMYHQTPEVTCVVVDVSHEDPEVKFNWYVDGVEVHNAKTKPREEQYNSTYRVVSVLNPYHQDWLNGKEYKCKVSNKALPAPIEKTISKAKGQPREPQVYTLPPSRDELTKNQVSLTCLVKGFYPSDIAVEWESNGQPENNYKTTPPVLDSDGSFFLYSKLTVDKSRWQQGNVFSCSVMHEALHNHYTQKSLSLSPGK

SEQ ID NO: 111 - protein, 227 aa, Artificial Sequence
  Amino acid sequence of Fc variant designated as SEQ ID NO. 111 in description
DKTHTCPPCPAPELLGGPSVFLFPPKPKDTVFPSRTPEVTCVVVDVSHEDPEVKFNWYVDGVEVHNAKTKPREEQYNSTYRVVSVLNPYHQDWLNGKEYKCKVSNKALPAPIEKTISKAKGQPREPQVYTLPPSRDELTKNQVSLTCLVKGFYPSDIAVEWESNGQPENNYKTTPPVLDSDGSFFLYSKLTVDKSRWQQGNVFSCSVMHEALHNHYTQKSLSLSPGK

SEQ ID NO: 112 - protein, 227 aa, Artificial Sequence
  Amino acid sequence of Fc variant designated as SEQ ID NO. 112 in description
DKTHTCPPCPAPELLGGPSVFLFPPKPKDQHLPSRTPEVTCVVVDVSHEDPEVKFNWYVDGVEVHNAKTKPREEQYNSTYRVVSVLTVLHQDWLNGKEYKCKVSNKALPAPIEKTISKAKGQPREPQVYTLPPSRDELTKNQVSLTCLVKGFYPSDIAIQQESNGQPENNYKTTPPVLDSDGSFFLYSKLTVDKSRWQQGNVFSCSVMHEALTHQYTQKSLSLSPGK

SEQ ID NO: 113 - protein, 227 aa, Artificial Sequence
  Amino acid sequence of Fc variant designated as SEQ ID NO. 113 in description
DKTHTCPPCPAPELLGGPSVFLFPPKPKDQHLPSRTPEVTCVVVDVSHEDPEVKFNWYVDGVEVHNAKTKPREEQYNSTYRVVSVLQTSHQDWLNGKEYKCKVSNKALPAPIEKTISKAKGQPREPQVYTLPPSRDELTKNQVSLTCLVKGFYPSDIAVEWESNGQPENNYKTTPPVLDSDGSFFLYSKLTVDKSRWQQGNVFSCSVMHEALTHQYTQKSLSLSPGK

SEQ ID NO: 114 - protein, 227 aa, Artificial Sequence
  Amino acid sequence of Fc variant designated as SEQ ID NO. 114 in description
DKTHTCPPCPAPELLGGPSVFLFPPKPKDQHLPSRQQYRTCVVVDVSHEDPEVKFNWYVDGVEVHNAKTKPREEQYNSTYRVVSVLTVLHQDWLNGKEYKCKVSNKALPAPIEKTISKAKGQPREPQVYTLPPSRDELTKNQVSLTCLVKGFYPSDIAVEWESNGQPENNYKTTPPVLDSDGSFFLYSKLTVDKSRWQQGNVFSCSVMHEALTHQYTQKSLSLSPGK

SEQ ID NO: 115 - protein, 227 aa, Artificial Sequence
  Amino acid sequence of Fc variant designated as SEQ ID NO. 115 in description
DKTHTCPPCPAPELLGGPSVFLFPPKPKDQHLPSRTPEVTCVVVDVSHEDPEVKFNWYVDGVEVHNAKTKPREEQYNSTYRVVSVLTVTPHDWLNGKEYKCKVSNKALPAPIEKTISKAKGQPREPQVYTLPPSRDELTKNQVSLTCLVKGFYPSDIAVEWESNGQPENNYKTTPPVLDSDGSFFLYSKLTVDKSRWQQGNVFSCSVMHEALTHQYTQKSLSLSPGK

SEQ ID NO: 116 - protein, 227 aa, Artificial Sequence
  Amino acid sequence of Fc variant designated as SEQ ID NO. 116 in description
DKTHTCPPCPAPELLGGPSVFLFPPKPKDQHLPHQTPEVTCVVVDVSHEDPEVKFNWYVDGVEVHNAKTKPREEQYNSTYRVVSVLTVLHQDWLNGKEYKCKVSNKALPAPIEKTISKAKGQPREPQVYTLPPSRDELTKNQVSLTCLVKGFYPSDIAVEWESNGQPENNYKTTPPVLDSDGSFFLYSKLTVDKSRWQQGNVFSCSVMHEALTHQYTQKSLSLSPGK

SEQ ID NO: 117 - protein, 227 aa, Artificial Sequence
  Amino acid sequence of Fc variant designated as SEQ ID NO. 117 in description
DKTHTCPPCPAPELLGGPSVFLFPPKPKDTLMISRTPEVTCVVVDVSHEDPEVKFNWYVDGVEVHNAKTKPREEQYNSTYRVVSVLTVLHQDWLNGKEYKCKVSNKALPAPIEKTISKAKGQPREPQVYTLPPSRDELTKNQVSLTCLVKGFYPSDIAIQQESNGQPENNYKTTPPVLDSDGSFFLYSKLTVDKSRWQQGNVFSCSVMHEALQWHYTQKSLSLSPGK

SEQ ID NO: 118 - protein, 227 aa, Artificial Sequence
  Amino acid sequence of Fc variant designated as SEQ ID NO. 118 in description
DKTHTCPPCPAPELLGGPSVFLFPPKPKDRAVSSRTPEVTCVVVDVSHEDPEVKFNWYVDGVEVHNAKTKPREEQYNSTYRVVSVLTVLHQDWLNGKEYKCKVSNKALPAPIEKTISKAKGQPREPQVYTLPPSRDELTKNQVSLTCLVKGFYPSDIAVEWESNGQPENNYKTTPPVLDSDGSFFLYSKLTVDKSRWQQGNVFSCSVMHEALQWHYTQKSLSLSPGK

SEQ ID NO: 119 - protein, 227 aa, Artificial Sequence
  Amino acid sequence of Fc variant designated as SEQ ID NO. 119 in description
DKTHTCPPCPAPELLGGPSVFLFPPKPKDALMISRTPEVTCVVVDVSHEDPEVKFNWYVDGVEVHNAKTKPREEQYNSTYRVVSVLYDLHQDWLNGKEYKCKVSNKALPAPIEKTISKAKGQPREPQVYTLPPSRDELTKNQVSLTCLVKGFYPSDIAVEWESNGQPENNYKTTPPVLDSDGSFFLYSKLTVDKSRWQQGNVFSCSVMHEALQWHYTQKSLSLSPGK

SEQ ID NO: 120 - protein, 227 aa, Artificial Sequence
  Amino acid sequence of Fc variant designated as SEQ ID NO. 120 in description
DKTHTCPPCPAPELLGGPSVFLFPPKPKDTLMISRTPEVTCVVVDVSHEDPEVKFNWYVDGVEVHNAKTKPREEQYNSTYRVVSVLQTSHQDWLNGKEYKCKVSNKALPAPIEKTISKAKGQPREPQVYTLPPSRDELTKNQVSLTCLVKGFYPSDIAVEWESNGQPENNYKTTPPVLDSDGSFFLYSKLTVDKSRWQQGNVFSCSVMHEALQWHYTQKSLSLSPGK

SEQ ID NO: 121 - protein, 227 aa, Artificial Sequence
  Amino acid sequence of Fc variant designated as SEQ ID NO. 121 in description
DKTHTCPPCPAPELLGGPSVFLFPPKPKDTLMISRQQYRTCVVVDVSHEDPEVKFNWYVDGVEVHNAKTKPREEQYNSTYRVVSVLTVLHQDWLNGKEYKCKVSNKALPAPIEKTISKAKGQPREPQVYTLPPSRDELTKNQVSLTCLVKGFYPSDIAVEWESNGQPENNYKTTPPVLDSDGSFFLYSKLTVDKSRWQQGNVFSCSVMHEALQWHYTQKSLSLSPGK

SEQ ID NO: 122 - protein, 227 aa, Artificial Sequence
  Amino acid sequence of Fc variant designated as SEQ ID NO. 122 in description
DKTHTCPPCPAPELLGGPSVFLFPPKPKDHEQQSRTPEVTCVVVDVSHEDPEVKFNWYVDGVEVHNAKTKPREEQYNSTYRVVSVLTVLHQDWLNGKEYKCKVSNKALPAPIEKTISKAKGQPREPQVYTLPPSRDELTKNQVSLTCLVKGFYPSDIAVEWESNGQPENNYKTTPPVLDSDGSFFLYSKLTVDKSRWQQGNVFSCSVMHEALQWHYTQKSLSLSPGK

SEQ ID NO: 123 - protein, 227 aa, Artificial Sequence
  Amino acid sequence of Fc variant designated as SEQ ID NO. 123 in description
DKTHTCPPCPAPELLGGPSVFLFPPKPKDTLMISRTPEVTCVVVDVSHEDPEVKFNWYVDGVEVHNAKTKPREEQYNSTYRVVSVLTVTPHDWLNGKEYKCKVSNKALPAPIEKTISKAKGQPREPQVYTLPPSRDELTKNQVSLTCLVKGFYPSDIAVEWESNGQPENNYKTTPPVLDSDGSFFLYSKLTVDKSRWQQGNVFSCSVMHEALQWHYTQKSLSLSPGK

SEQ ID NO: 124 - protein, 227 aa, Artificial Sequence
  Amino acid sequence of Fc variant designated as SEQ ID NO. 124 in description
DKTHTCPPCPAPELLGGPSVFLFPPKPKDARHTSRTPEVTCVVVDVSHEDPEVKFNWYVDGVEVHNAKTKPREEQYNSTYRVVSVLTVLHQDWLNGKEYKCKVSNKALPAPIEKTISKAKGQPREPQVYTLPPSRDELTKNQVSLTCLVKGFYPSDIAVEWESNGQPENNYKTTPPVLDSDGSFFLYSKLTVDKSRWQQGNVFSCSVMHEALQWHYTQKSLSLSPGK

SEQ ID NO: 125 - protein, 227 aa, Artificial Sequence
  Amino acid sequence of Fc variant designated as SEQ ID NO. 125 in description
DKTHTCPPCPAPELLGGPSVFLFPPKPKDVYQISRTPEVTCVVVDVSHEDPEVKFNWYVDGVEVHNAKTKPREEQYNSTYRVVSVLTVLHQDWLNGKEYKCKVSNKALPAPIEKTISKAKGQPREPQVYTLPPSRDELTKNQVSLTCLVKGFYPSDIAVEWESNGQPENNYKTTPPVLDSDGSFFLYSKLTVDKSRWQQGNVFSCSVMHEALQWHYTQKSLSLSPGK

SEQ ID NO: 126 - protein, 227 aa, Artificial Sequence
  Amino acid sequence of Fc variant designated as SEQ ID NO. 126 in description
DKTHTCPPCPAPELLGGPSVFLFPPKPKDKCQNSRTPEVTCVVVDVSHEDPEVKFNWYVDGVEVHNAKTKPREEQYNSTYRVVSVLTVLHQDWLNGKEYKCKVSNKALPAPIEKTISKAKGQPREPQVYTLPPSRDELTKNQVSLTCLVKGFYPSDIAVEWESNGQPENNYKTTPPVLDSDGSFFLYSKLTVDKSRWQQGNVFSCSVMHEALQWHYTQKSLSLSPGK

SEQ ID NO: 127 - protein, 227 aa, Artificial Sequence
  Amino acid sequence of Fc variant designated as SEQ ID NO. 127 in description
DKTHTCPPCPAPELLGGPSVFLFPPKPKDTLMYHQTPEVTCVVVDVSHEDPEVKFNWYVDGVEVHNAKTKPREEQYNSTYRVVSVLTVLHQDWLNGKEYKCKVSNKALPAPIEKTISKAKGQPREPQVYTLPPSRDELTKNQVSLTCLVKGFYPSDIAVEWESNGQPENNYKTTPPVLDSDGSFFLYSKLTVDKSRWQQGNVFSCSVMHEALQWHYTQKSLSLSPGK

SEQ ID NO: 128 - protein, 227 aa, Artificial Sequence
  Amino acid sequence of Fc variant designated as SEQ ID NO. 128 in description
DKTHTCPPCPAPELLGGPSVFLFPPKPKDTVFPSRTPEVTCVVVDVSHEDPEVKFNWYVDGVEVHNAKTKPREEQYNSTYRVVSVLTVLHQDWLNGKEYKCKVSNKALPAPIEKTISKAKGQPREPQVYTLPPSRDELTKNQVSLTCLVKGFYPSDIAVEWESNGQPENNYKTTPPVLDSDGSFFLYSKLTVDKSRWQQGNVFSCSVMHEALQWHYTQKSLSLSPGK

SEQ ID NO: 129 - protein, 227 aa, Artificial Sequence
  Amino acid sequence of Fc variant designated as SEQ ID NO. 129 in description
DKTHTCPPCPAPELLGGPSVFLFPPKPKDTLMISRTPEVTCVVVDVSHEDPEVKFNWYVDGVEVHNAKTKPREEQYNSTYRVVSVLTVLHQDWLNGKEYKCKVSNKALPAPIEKTISKAKGQPREPQVYTLPPSRDELTKNQVSLTCLVKGFYPSDIAIQQESNGQPENNYKTTPPVLDSDGSFFLYSKLTVDKSRWQQGNVFSCSVMHEALPWKYTQKSLSLSPGK

SEQ ID NO: 130 - protein, 227 aa, Artificial Sequence
  Amino acid sequence of Fc variant designated as SEQ ID NO. 130 in description
DKTHTCPPCPAPELLGGPSVFLFPPKPKDRAVSSRTPEVTCVVVDVSHEDPEVKFNWYVDGVEVHNAKTKPREEQYNSTYRVVSVLTVLHQDWLNGKEYKCKVSNKALPAPIEKTISKAKGQPREPQVYTLPPSRDELTKNQVSLTCLVKGFYPSDIAVEWESNGQPENNYKTTPPVLDSDGSFFLYSKLTVDKSRWQQGNVFSCSVMHEALPWKYTQKSLSLSPGK

SEQ ID NO: 131 - protein, 227 aa, Artificial Sequence
  Amino acid sequence of Fc variant designated as SEQ ID NO. 1311 in description
DKTHTCPPCPAPELLGGPSVFLFPPKPKDALMISRTPEVTCVVVDVSHEDPEVKFNWYVDGVEVHNAKTKPREEQYNSTYRVVSVLYDLHQDWLNGKEYKCKVSNKALPAPIEKTISKAKGQPREPQVYTLPPSRDELTKNQVSLTCLVKGFYPSDIAVEWESNGQPENNYKTTPPVLDSDGSFFLYSKLTVDKSRWQQGNVFSCSVMHEALPWKYTQKSLSLSPGK

SEQ ID NO: 132 - protein, 227 aa, Artificial Sequence
  Amino acid sequence of Fc variant designated as SEQ ID NO. 132 in description
DKTHTCPPCPAPELLGGPSVFLFPPKPKDTLMISRTPEVTCVVVDVSHEDPEVKFNWYVDGVEVHNAKTKPREEQYNSTYRVVSVLQTSHQDWLNGKEYKCKVSNKALPAPIEKTISKAKGQPREPQVYTLPPSRDELTKNQVSLTCLVKGFYPSDIAVEWESNGQPENNYKTTPPVLDSDGSFFLYSKLTVDKSRWQQGNVFSCSVMHEALPWKYTQKSLSLSPGK

SEQ ID NO: 133 - protein, 227 aa, Artificial Sequence
  Amino acid sequence of Fc variant designated as SEQ ID NO. 133 in description
DKTHTCPPCPAPELLGGPSVFLFPPKPKDTLMISRQQYRTCVVVDVSHEDPEVKFNWYVDGVEVHNAKTKPREEQYNSTYRVVSVLTVLHQDWLNGKEYKCKVSNKALPAPIEKTISKAKGQPREPQVYTLPPSRDELTKNQVSLTCLVKGFYPSDIAVEWESNGQPENNYKTTPPVLDSDGSFFLYSKLTVDKSRWQQGNVFSCSVMHEALPWKYTQKSLSLSPGK

SEQ ID NO: 134 - protein, 227 aa, Artificial Sequence
  Amino acid sequence of Fc variant designated as SEQ ID NO. 134 in description
DKTHTCPPCPAPELLGGPSVFLFPPKPKDHEQQSRTPEVTCVVVDVSHEDPEVKFNWYVDGVEVHNAKTKPREEQYNSTYRVVSVLTVLHQDWLNGKEYKCKVSNKALPAPIEKTISKAKGQPREPQVYTLPPSRDELTKNQVSLTCLVKGFYPSDIAVEWESNGQPENNYKTTPPVLDSDGSFFLYSKLTVDKSRWQQGNVFSCSVMHEALPWKYTQKSLSLSPGK

SEQ ID NO: 135 - protein, 227 aa, Artificial Sequence
  Amino acid sequence of Fc variant designated as SEQ ID NO. 135 in description
DKTHTCPPCPAPELLGGPSVFLFPPKPKDTLMISRTPEVTCVVVDVSHEDPEVKFNWYVDGVEVHNAKTKPREEQYNSTYRVVSVLTVTPHDWLNGKEYKCKVSNKALPAPIEKTISKAKGQPREPQVYTLPPSRDELTKNQVSLTCLVKGFYPSDIAVEWESNGQPENNYKTTPPVLDSDGSFFLYSKLTVDKSRWQQGNVFSCSVMHEALPWKYTQKSLSLSPGK

SEQ ID NO: 136 - protein, 227 aa, Artificial Sequence
  Amino acid sequence of Fc variant designated as SEQ ID NO. 136 in description
DKTHTCPPCPAPELLGGPSVFLFPPKPKDARHTSRTPEVTCVVVDVSHEDPEVKFNWYVDGVEVHNAKTKPREEQYNSTYRVVSVLTVLHQDWLNGKEYKCKVSNKALPAPIEKTISKAKGQPREPQVYTLPPSRDELTKNQVSLTCLVKGFYPSDIAVEWESNGQPENNYKTTPPVLDSDGSFFLYSKLTVDKSRWQQGNVFSCSVMHEALPWKYTQKSLSLSPGK

SEQ ID NO: 137 - protein, 227 aa, Artificial Sequence
  Amino acid sequence of Fc variant designated as SEQ ID NO. 137 in description
DKTHTCPPCPAPELLGGPSVFLFPPKPKDVYQISRTPEVTCVVVDVSHEDPEVKFNWYVDGVEVHNAKTKPREEQYNSTYRVVSVLTVLHQDWLNGKEYKCKVSNKALPAPIEKTISKAKGQPREPQVYTLPPSRDELTKNQVSLTCLVKGFYPSDIAVEWESNGQPENNYKTTPPVLDSDGSFFLYSKLTVDKSRWQQGNVFSCSVMHEALPWKYTQKSLSLSPGK

SEQ ID NO: 138 - protein, 227 aa, Artificial Sequence
  Amino acid sequence of Fc variant designated as SEQ ID NO. 138 in description
DKTHTCPPCPAPELLGGPSVFLFPPKPKDKCQNSRTPEVTCVVVDVSHEDPEVKFNWYVDGVEVHNAKTKPREEQYNSTYRVVSVLTVLHQDWLNGKEYKCKVSNKALPAPIEKTISKAKGQPREPQVYTLPPSRDELTKNQVSLTCLVKGFYPSDIAVEWESNGQPENNYKTTPPVLDSDGSFFLYSKLTVDKSRWQQGNVFSCSVMHEALPWKYTQKSLSLSPGK

SEQ ID NO: 139 - protein, 227 aa, Artificial Sequence
  Amino acid sequence of Fc variant designated as SEQ ID NO. 139 in description
DKTHTCPPCPAPELLGGPSVFLFPPKPKDTLMYHQTPEVTCVVVDVSHEDPEVKFNWYVDGVEVHNAKTKPREEQYNSTYRVVSVLTVLHQDWLNGKEYKCKVSNKALPAPIEKTISKAKGQPREPQVYTLPPSRDELTKNQVSLTCLVKGFYPSDIAVEWESNGQPENNYKTTPPVLDSDGSFFLYSKLTVDKSRWQQGNVFSCSVMHEALPWKYTQKSLSLSPGK

SEQ ID NO: 140 - protein, 227 aa, Artificial Sequence
  Amino acid sequence of Fc variant designated as SEQ ID NO. 140 in description
DKTHTCPPCPAPELLGGPSVFLFPPKPKDTVFPSRTPEVTCVVVDVSHEDPEVKFNWYVDGVEVHNAKTKPREEQYNSTYRVVSVLTVLHQDWLNGKEYKCKVSNKALPAPIEKTISKAKGQPREPQVYTLPPSRDELTKNQVSLTCLVKGFYPSDIAVEWESNGQPENNYKTTPPVLDSDGSFFLYSKLTVDKSRWQQGNVFSCSVMHEALPWKYTQKSLSLSPGK

SEQ ID NO: 141 - protein, 227 aa, Artificial Sequence
  Amino acid sequence of Fc variant designated as SEQ ID NO. 141 in description
DKTHTCPPCPAPELLGGPSVFLFPPKPKDTLMISRTPEVTCVVVDVSHEDPEVKFNWYVDGVEVHNAKTKPREEQYNSTYRVVSVLTVLHQDWLNGKEYKCKVSNKALPAPIEKTISKAKGQPREPQVYTLPPSRDELTKNQVSLTCLVKGFYPSDIAIQQESNGQPENNYKTTPPVLDSDGSFFLYSKLTVDKSRWQQGNVFSCSVMHEALRHKYTQKSLSLSPGK

SEQ ID NO: 142 - protein, 227 aa, Artificial Sequence
  Amino acid sequence of Fc variant designated as SEQ ID NO. 142 in description
DKTHTCPPCPAPELLGGPSVFLFPPKPKDRAVSSRTPEVTCVVVDVSHEDPEVKFNWYVDGVEVHNAKTKPREEQYNSTYRVVSVLTVLHQDWLNGKEYKCKVSNKALPAPIEKTISKAKGQPREPQVYTLPPSRDELTKNQVSLTCLVKGFYPSDIAVEWESNGQPENNYKTTPPVLDSDGSFFLYSKLTVDKSRWQQGNVFSCSVMHEALRHKYTQKSLSLSPGK

SEQ ID NO: 143 - protein, 227 aa, Artificial Sequence
  Amino acid sequence of Fc variant designated as SEQ ID NO. 143 in description
DKTHTCPPCPAPELLGGPSVFLFPPKPKDALMISRTPEVTCVVVDVSHEDPEVKFNWYVDGVEVHNAKTKPREEQYNSTYRVVSVLYDLHQDWLNGKEYKCKVSNKALPAPIEKTISKAKGQPREPQVYTLPPSRDELTKNQVSLTCLVKGFYPSDIAVEWESNGQPENNYKTTPPVLDSDGSFFLYSKLTVDKSRWQQGNVFSCSVMHEALRHKYTQKSLSLSPGK

SEQ ID NO: 144 - protein, 227 aa, Artificial Sequence
  Amino acid sequence of Fc variant designated as SEQ ID NO. 144 in description
DKTHTCPPCPAPELLGGPSVFLFPPKPKDTLMISRTPEVTCVVVDVSHEDPEVKFNWYVDGVEVHNAKTKPREEQYNSTYRVVSVLQTSHQDWLNGKEYKCKVSNKALPAPIEKTISKAKGQPREPQVYTLPPSRDELTKNQVSLTCLVKGFYPSDIAVEWESNGQPENNYKTTPPVLDSDGSFFLYSKLTVDKSRWQQGNVFSCSVMHEALRHKYTQKSLSLSPGK

SEQ ID NO: 145 - protein, 227 aa, Artificial Sequence
  Amino acid sequence of Fc variant designated as SEQ ID NO. 145 in description
DKTHTCPPCPAPELLGGPSVFLFPPKPKDTLMISRQQYRTCVVVDVSHEDPEVKFNWYVDGVEVHNAKTKPREEQYNSTYRVVSVLTVLHQDWLNGKEYKCKVSNKALPAPIEKTISKAKGQPREPQVYTLPPSRDELTKNQVSLTCLVKGFYPSDIAVEWESNGQPENNYKTTPPVLDSDGSFFLYSKLTVDKSRWQQGNVFSCSVMHEALRHKYTQKSLSLSPGK

SEQ ID NO: 146 - protein, 227 aa, Artificial Sequence
  Amino acid sequence of Fc variant designated as SEQ ID NO. 146 in description
DKTHTCPPCPAPELLGGPSVFLFPPKPKDHEQQSRTPEVTCVVVDVSHEDPEVKFNWYVDGVEVHNAKTKPREEQYNSTYRVVSVLTVLHQDWLNGKEYKCKVSNKALPAPIEKTISKAKGQPREPQVYTLPPSRDELTKNQVSLTCLVKGFYPSDIAVEWESNGQPENNYKTTPPVLDSDGSFFLYSKLTVDKSRWQQGNVFSCSVMHEALRHKYTQKSLSLSPGK

SEQ ID NO: 147 - protein, 227 aa, Artificial Sequence
  Amino acid sequence of Fc variant designated as SEQ ID NO. 147 in description
DKTHTCPPCPAPELLGGPSVFLFPPKPKDTLMISRTPEVTCVVVDVSHEDPEVKFNWYVDGVEVHNAKTKPREEQYNSTYRVVSVLTVTPHDWLNGKEYKCKVSNKALPAPIEKTISKAKGQPREPQVYTLPPSRDELTKNQVSLTCLVKGFYPSDIAVEWESNGQPENNYKTTPPVLDSDGSFFLYSKLTVDKSRWQQGNVFSCSVMHEALRHKYTQKSLSLSPGK

SEQ ID NO: 148 - protein, 227 aa, Artificial Sequence
  Amino acid sequence of Fc variant designated as SEQ ID NO. 148 in description
DKTHTCPPCPAPELLGGPSVFLFPPKPKDARHTSRTPEVTCVVVDVSHEDPEVKFNWYVDGVEVHNAKTKPREEQYNSTYRVVSVLTVLHQDWLNGKEYKCKVSNKALPAPIEKTISKAKGQPREPQVYTLPPSRDELTKNQVSLTCLVKGFYPSDIAVEWESNGQPENNYKTTPPVLDSDGSFFLYSKLTVDKSRWQQGNVFSCSVMHEALRHKYTQKSLSLSPGK

SEQ ID NO: 149 - protein, 227 aa, Artificial Sequence
  Amino acid sequence of Fc variant designated as SEQ ID NO. 149 in description
DKTHTCPPCPAPELLGGPSVFLFPPKPKDVYQISRTPEVTCVVVDVSHEDPEVKFNWYVDGVEVHNAKTKPREEQYNSTYRVVSVLTVLHQDWLNGKEYKCKVSNKALPAPIEKTISKAKGQPREPQVYTLPPSRDELTKNQVSLTCLVKGFYPSDIAVEWESNGQPENNYKTTPPVLDSDGSFFLYSKLTVDKSRWQQGNVFSCSVMHEALRHKYTQKSLSLSPGK

SEQ ID NO: 150 - protein, 227 aa, Artificial Sequence
  Amino acid sequence of Fc variant designated as SEQ ID NO. 150 in description
DKTHTCPPCPAPELLGGPSVFLFPPKPKDKCQNSRTPEVTCVVVDVSHEDPEVKFNWYVDGVEVHNAKTKPREEQYNSTYRVVSVLTVLHQDWLNGKEYKCKVSNKALPAPIEKTISKAKGQPREPQVYTLPPSRDELTKNQVSLTCLVKGFYPSDIAVEWESNGQPENNYKTTPPVLDSDGSFFLYSKLTVDKSRWQQGNVFSCSVMHEALRHKYTQKSLSLSPGK

SEQ ID NO: 151 - protein, 227 aa, Artificial Sequence
  Amino acid sequence of Fc variant designated as SEQ ID NO. 151 in description
DKTHTCPPCPAPELLGGPSVFLFPPKPKDTLMYHQTPEVTCVVVDVSHEDPEVKFNWYVDGVEVHNAKTKPREEQYNSTYRVVSVLTVLHQDWLNGKEYKCKVSNKALPAPIEKTISKAKGQPREPQVYTLPPSRDELTKNQVSLTCLVKGFYPSDIAVEWESNGQPENNYKTTPPVLDSDGSFFLYSKLTVDKSRWQQGNVFSCSVMHEALRHKYTQKSLSLSPGK

SEQ ID NO: 152 - protein, 227 aa, Artificial Sequence
  Amino acid sequence of Fc variant designated as SEQ ID NO. 152 in description
DKTHTCPPCPAPELLGGPSVFLFPPKPKDTVFPSRTPEVTCVVVDVSHEDPEVKFNWYVDGVEVHNAKTKPREEQYNSTYRVVSVLTVLHQDWLNGKEYKCKVSNKALPAPIEKTISKAKGQPREPQVYTLPPSRDELTKNQVSLTCLVKGFYPSDIAVEWESNGQPENNYKTTPPVLDSDGSFFLYSKLTVDKSRWQQGNVFSCSVMHEALRHKYTQKSLSLSPGK

SEQ ID NO: 153 - protein, 227 aa, Artificial Sequence
  Amino acid sequence of Fc variant designated as SEQ ID NO. 153 in description
DKTHTCPPCPAPELLGGPSVFLFPPKPKDTLMISRTPEVTCVVVDVSHEDPEVKFNWYVDGVEVHNAKTKPREEQYNSTYRVVSVLTVLHQDWLNGKEYKCKVSNKALPAPIEKTISKAKGQPREPQVYTLPPSRDELTKNQVSLTCLVKGFYPRDLAIQQESNGQPENNYKTTPPVLDSDGSFFLYSKLTVDKSRWQQGNVFSCSVMHEACKFHYTQKSLSLSPGK

SEQ ID NO: 154 - protein, 227 aa, Artificial Sequence
  Amino acid sequence of Fc variant designated as SEQ ID NO. 154 in description
DKTHTCPPCPAPELLGGPSVFLFPPKPKDRAVSSRTPEVTCVVVDVSHEDPEVKFNWYVDGVEVHNAKTKPREEQYNSTYRVVSVLTVLHQDWLNGKEYKCKVSNKALPAPIEKTISKAKGQPREPQVYTLPPSRDELTKNQVSLTCLVKGFYPRDLAVEWESNGQPENNYKTTPPVLDSDGSFFLYSKLTVDKSRWQQGNVFSCSVMHEACKFHYTQKSLSLSPGK

SEQ ID NO: 155 - protein, 227 aa, Artificial Sequence
  Amino acid sequence of Fc variant designated as SEQ ID NO. 155 in description
DKTHTCPPCPAPELLGGPSVFLFPPKPKDALMISRTPEVTCVVVDVSHEDPEVKFNWYVDGVEVHNAKTKPREEQYNSTYRVVSVLYDLHQDWLNGKEYKCKVSNKALPAPIEKTISKAKGQPREPQVYTLPPSRDELTKNQVSLTCLVKGFYPRDLAVEWESNGQPENNYKTTPPVLDSDGSFFLYSKLTVDKSRWQQGNVFSCSVMHEACKFHYTQKSLSLSPGK

SEQ ID NO: 156 - protein, 227 aa, Artificial Sequence
  Amino acid sequence of Fc variant designated as SEQ ID NO. 156 in description
DKTHTCPPCPAPELLGGPSVFLFPPKPKDTLMISRTPEVTCVVVDVSHEDPEVKFNWYVDGVEVHNAKTKPREEQYNSTYRVVSVLQTSHQDWLNGKEYKCKVSNKALPAPIEKTISKAKGQPREPQVYTLPPSRDELTKNQVSLTCLVKGFYPRDLAVEWESNGQPENNYKTTPPVLDSDGSFFLYSKLTVDKSRWQQGNVFSCSVMHEACKFHYTQKSLSLSPGK

SEQ ID NO: 157 - protein, 227 aa, Artificial Sequence
  Amino acid sequence of Fc variant designated as SEQ ID NO. 157 in description
DKTHTCPPCPAPELLGGPSVFLFPPKPKDTLMISRQQYRTCVVVDVSHEDPEVKFNWYVDGVEVHNAKTKPREEQYNSTYRVVSVLTVLHQDWLNGKEYKCKVSNKALPAPIEKTISKAKGQPREPQVYTLPPSRDELTKNQVSLTCLVKGFYPRDLAVEWESNGQPENNYKTTPPVLDSDGSFFLYSKLTVDKSRWQQGNVFSCSVMHEACKFHYTQKSLSLSPGK

SEQ ID NO: 158 - protein, 227 aa, Artificial Sequence
  Amino acid sequence of Fc variant designated as SEQ ID NO. 158 in description
DKTHTCPPCPAPELLGGPSVFLFPPKPKDHEQQSRTPEVTCVVVDVSHEDPEVKFNWYVDGVEVHNAKTKPREEQYNSTYRVVSVLTVLHQDWLNGKEYKCKVSNKALPAPIEKTISKAKGQPREPQVYTLPPSRDELTKNQVSLTCLVKGFYPRDLAVEWESNGQPENNYKTTPPVLDSDGSFFLYSKLTVDKSRWQQGNVFSCSVMHEACKFHYTQKSLSLSPGK

SEQ ID NO: 159 - protein, 227 aa, Artificial Sequence
  Amino acid sequence of Fc variant designated as SEQ ID NO. 159 in description
DKTHTCPPCPAPELLGGPSVFLFPPKPKDTLMISRTPEVTCVVVDVSHEDPEVKFNWYVDGVEVHNAKTKPREEQYNSTYRVVSVLTVTPHDWLNGKEYKCKVSNKALPAPIEKTISKAKGQPREPQVYTLPPSRDELTKNQVSLTCLVKGFYPRDLAVEWESNGQPENNYKTTPPVLDSDGSFFLYSKLTVDKSRWQQGNVFSCSVMHEACKFHYTQKSLSLSPGK

SEQ ID NO: 160 - protein, 227 aa, Artificial Sequence
  Amino acid sequence of Fc variant designated as SEQ ID NO. 160 in description
DKTHTCPPCPAPELLGGPSVFLFPPKPKDARHTSRTPEVTCVVVDVSHEDPEVKFNWYVDGVEVHNAKTKPREEQYNSTYRVVSVLTVLHQDWLNGKEYKCKVSNKALPAPIEKTISKAKGQPREPQVYTLPPSRDELTKNQVSLTCLVKGFYPRDLAVEWESNGQPENNYKTTPPVLDSDGSFFLYSKLTVDKSRWQQGNVFSCSVMHEACKFHYTQKSLSLSPGK

SEQ ID NO: 161 - protein, 227 aa, Artificial Sequence
  Amino acid sequence of Fc variant designated as SEQ ID NO. 161 in description
DKTHTCPPCPAPELLGGPSVFLFPPKPKDVYQISRTPEVTCVVVDVSHEDPEVKFNWYVDGVEVHNAKTKPREEQYNSTYRVVSVLTVLHQDWLNGKEYKCKVSNKALPAPIEKTISKAKGQPREPQVYTLPPSRDELTKNQVSLTCLVKGFYPRDLAVEWESNGQPENNYKTTPPVLDSDGSFFLYSKLTVDKSRWQQGNVFSCSVMHEACKFHYTQKSLSLSPGK

SEQ ID NO: 162 - protein, 227 aa, Artificial Sequence
  Amino acid sequence of Fc variant designated as SEQ ID NO. 162 in description
DKTHTCPPCPAPELLGGPSVFLFPPKPKDTLMISRTPEVTCVVVDVSHEDPEVKFNWYVDGVEVHNAKTKPREEQYNSTYRVVSVLTVLHQDWLNGKEYKCKVSNKALPAPIEKTISKAKGQPREPQVYTLPPSRDELTKNQVSLTCLVKGFYPSDIAIQQESNGQPENNYKTTPPVLDSDGSFFLYSKLTVDKSRWQQGNVFSCSVMHEAWFDKYTQKSLSLSPGK

SEQ ID NO: 163 - protein, 227 aa, Artificial Sequence
  Amino acid sequence of Fc variant designated as SEQ ID NO. 163 in description
DKTHTCPPCPAPELLGGPSVFLFPPKPKDRAVSSRTPEVTCVVVDVSHEDPEVKFNWYVDGVEVHNAKTKPREEQYNSTYRVVSVLTVLHQDWLNGKEYKCKVSNKALPAPIEKTISKAKGQPREPQVYTLPPSRDELTKNQVSLTCLVKGFYPSDIAVEWESNGQPENNYKTTPPVLDSDGSFFLYSKLTVDKSRWQQGNVFSCSVMHEAWFDKYTQKSLSLSPGK

SEQ ID NO: 164 - protein, 227 aa, Artificial Sequence
  Amino acid sequence of Fc variant designated as SEQ ID NO. 164 in description
DKTHTCPPCPAPELLGGPSVFLFPPKPKDALMISRTPEVTCVVVDVSHEDPEVKFNWYVDGVEVHNAKTKPREEQYNSTYRVVSVLYDLHQDWLNGKEYKCKVSNKALPAPIEKTISKAKGQPREPQVYTLPPSRDELTKNQVSLTCLVKGFYPSDIAVEWESNGQPENNYKTTPPVLDSDGSFFLYSKLTVDKSRWQQGNVFSCSVMHEAWFDKYTQKSLSLSPGK

SEQ ID NO: 165 - protein, 227 aa, Artificial Sequence
  Amino acid sequence of Fc variant designated as SEQ ID NO. 165 in description
DKTHTCPPCPAPELLGGPSVFLFPPKPKDTLMISRTPEVTCVVVDVSHEDPEVKFNWYVDGVEVHNAKTKPREEQYNSTYRVVSVLQTSHQDWLNGKEYKCKVSNKALPAPIEKTISKAKGQPREPQVYTLPPSRDELTKNQVSLTCLVKGFYPSDIAVEWESNGQPENNYKTTPPVLDSDGSFFLYSKLTVDKSRWQQGNVFSCSVMHEAWFDKYTQKSLSLSPGK

SEQ ID NO: 166 - protein, 227 aa, Artificial Sequence
  Amino acid sequence of Fc variant designated as SEQ ID NO. 166 in description
DKTHTCPPCPAPELLGGPSVFLFPPKPKDTLMISRQQYRTCVVVDVSHEDPEVKFNWYVDGVEVHNAKTKPREEQYNSTYRVVSVLTVLHQDWLNGKEYKCKVSNKALPAPIEKTISKAKGQPREPQVYTLPPSRDELTKNQVSLTCLVKGFYPSDIAVEWESNGQPENNYKTTPPVLDSDGSFFLYSKLTVDKSRWQQGNVFSCSVMHEAWFDKYTQKSLSLSPGK

SEQ ID NO: 167 - protein, 227 aa, Artificial Sequence
  Amino acid sequence of Fc variant designated as SEQ ID NO. 167 in description
DKTHTCPPCPAPELLGGPSVFLFPPKPKDHEQQSRTPEVTCVVVDVSHEDPEVKFNWYVDGVEVHNAKTKPREEQYNSTYRVVSVLTVLHQDWLNGKEYKCKVSNKALPAPIEKTISKAKGQPREPQVYTLPPSRDELTKNQVSLTCLVKGFYPSDIAVEWESNGQPENNYKTTPPVLDSDGSFFLYSKLTVDKSRWQQGNVFSCSVMHEAWFDKYTQKSLSLSPGK

SEQ ID NO: 168 - protein, 227 aa, Artificial Sequence
  Amino acid sequence of Fc variant designated as SEQ ID NO. 168 in description
DKTHTCPPCPAPELLGGPSVFLFPPKPKDTLMISRTPEVTCVVVDVSHEDPEVKFNWYVDGVEVHNAKTKPREEQYNSTYRVVSVLTVTPHDWLNGKEYKCKVSNKALPAPIEKTISKAKGQPREPQVYTLPPSRDELTKNQVSLTCLVKGFYPSDIAVEWESNGQPENNYKTTPPVLDSDGSFFLYSKLTVDKSRWQQGNVFSCSVMHEAWFDKYTQKSLSLSPGK

SEQ ID NO: 169 - protein, 227 aa, Artificial Sequence
  Amino acid sequence of Fc variant designated as SEQ ID NO. 169 in description
DKTHTCPPCPAPELLGGPSVFLFPPKPKDARHTSRTPEVTCVVVDVSHEDPEVKFNWYVDGVEVHNAKTKPREEQYNSTYRVVSVLTVLHQDWLNGKEYKCKVSNKALPAPIEKTISKAKGQPREPQVYTLPPSRDELTKNQVSLTCLVKGFYPSDIAVEWESNGQPENNYKTTPPVLDSDGSFFLYSKLTVDKSRWQQGNVFSCSVMHEAWFDKYTQKSLSLSPGK

SEQ ID NO: 170 - protein, 227 aa, Artificial Sequence
  Amino acid sequence of Fc variant designated as SEQ ID NO. 170 in description
DKTHTCPPCPAPELLGGPSVFLFPPKPKDVYQISRTPEVTCVVVDVSHEDPEVKFNWYVDGVEVHNAKTKPREEQYNSTYRVVSVLTVLHQDWLNGKEYKCKVSNKALPAPIEKTISKAKGQPREPQVYTLPPSRDELTKNQVSLTCLVKGFYPSDIAVEWESNGQPENNYKTTPPVLDSDGSFFLYSKLTVDKSRWQQGNVFSCSVMHEAWFDKYTQKSLSLSPGK

SEQ ID NO: 171 - protein, 227 aa, Artificial Sequence
  Amino acid sequence of Fc variant designated as SEQ ID NO. 171 in description
DKTHTCPPCPAPELLGGPSVFLFPPKPKDKCQNSRTPEVTCVVVDVSHEDPEVKFNWYVDGVEVHNAKTKPREEQYNSTYRVVSVLTVLHQDWLNGKEYKCKVSNKALPAPIEKTISKAKGQPREPQVYTLPPSRDELTKNQVSLTCLVKGFYPSDIAVEWESNGQPENNYKTTPPVLDSDGSFFLYSKLTVDKSRWQQGNVFSCSVMHEAWFDKYTQKSLSLSPGK

SEQ ID NO: 172 - protein, 227 aa, Artificial Sequence
  Amino acid sequence of Fc variant designated as SEQ ID NO. 172 in description
DKTHTCPPCPAPELLGGPSVFLFPPKPKDTLMYHQTPEVTCVVVDVSHEDPEVKFNWYVDGVEVHNAKTKPREEQYNSTYRVVSVLTVLHQDWLNGKEYKCKVSNKALPAPIEKTISKAKGQPREPQVYTLPPSRDELTKNQVSLTCLVKGFYPSDIAVEWESNGQPENNYKTTPPVLDSDGSFFLYSKLTVDKSRWQQGNVFSCSVMHEAWFDKYTQKSLSLSPGK

SEQ ID NO: 173 - protein, 227 aa, Artificial Sequence
  Amino acid sequence of Fc variant designated as SEQ ID NO. 173 in description
DKTHTCPPCPAPELLGGPSVFLFPPKPKDTVFPSRTPEVTCVVVDVSHEDPEVKFNWYVDGVEVHNAKTKPREEQYNSTYRVVSVLTVLHQDWLNGKEYKCKVSNKALPAPIEKTISKAKGQPREPQVYTLPPSRDELTKNQVSLTCLVKGFYPSDIAVEWESNGQPENNYKTTPPVLDSDGSFFLYSKLTVDKSRWQQGNVFSCSVMHEAWFDKYTQKSLSLSPGK

SEQ ID NO: 174 - protein, 227 aa, Artificial Sequence
  Amino acid sequence of Fc variant designated as SEQ ID NO. 174 in description
DKTHTCPPCPAPELLGGPSVFLFPPKPKDTLMISRTPEVTCVVVDVSHEDPEVKFNWYVDGVEVHNAKTKPREEQYNSTYRVVSVLTVLHQDWLNGKEYKCKVSNKALPAPIEKTISKAKGQPREPQVYTLPPSRDELTKNQVSLTCLVKGFYPSDIAIQQESNGQPENNYKTTPPVLDSDGSFFLYSKLTVDKSRWQQGNVFSCSVMHEAFSGHYTQKSLSLSPGK

SEQ ID NO: 175 - protein, 227 aa, Artificial Sequence
  Amino acid sequence of Fc variant designated as SEQ ID NO. 175 in description
DKTHTCPPCPAPELLGGPSVFLFPPKPKDRAVSSRTPEVTCVVVDVSHEDPEVKFNWYVDGVEVHNAKTKPREEQYNSTYRVVSVLTVLHQDWLNGKEYKCKVSNKALPAPIEKTISKAKGQPREPQVYTLPPSRDELTKNQVSLTCLVKGFYPSDIAVEWESNGQPENNYKTTPPVLDSDGSFFLYSKLTVDKSRWQQGNVFSCSVMHEAFSGHYTQKSLSLSPGK

SEQ ID NO: 176 - protein, 227 aa, Artificial Sequence
  Amino acid sequence of Fc variant designated as SEQ ID NO. 176 in description
DKTHTCPPCPAPELLGGPSVFLFPPKPKDALMISRTPEVTCVVVDVSHEDPEVKFNWYVDGVEVHNAKTKPREEQYNSTYRVVSVLYDLHQDWLNGKEYKCKVSNKALPAPIEKTISKAKGQPREPQVYTLPPSRDELTKNQVSLTCLVKGFYPSDIAVEWESNGQPENNYKTTPPVLDSDGSFFLYSKLTVDKSRWQQGNVFSCSVMHEAFSGHYTQKSLSLSPGK

SEQ ID NO: 177 - protein, 227 aa, Artificial Sequence
  Amino acid sequence of Fc variant designated as SEQ ID NO. 177 in description
DKTHTCPPCPAPELLGGPSVFLFPPKPKDTLMISRTPEVTCVVVDVSHEDPEVKFNWYVDGVEVHNAKTKPREEQYNSTYRVVSVLQTSHQDWLNGKEYKCKVSNKALPAPIEKTISKAKGQPREPQVYTLPPSRDELTKNQVSLTCLVKGFYPSDIAVEWESNGQPENNYKTTPPVLDSDGSFFLYSKLTVDKSRWQQGNVFSCSVMHEAFSGHYTQKSLSLSPGK

SEQ ID NO: 178 - protein, 227 aa, Artificial Sequence
  Amino acid sequence of Fc variant designated as SEQ ID NO. 178 in description
DKTHTCPPCPAPELLGGPSVFLFPPKPKDTLMISRQQYRTCVVVDVSHEDPEVKFNWYVDGVEVHNAKTKPREEQYNSTYRVVSVLTVLHQDWLNGKEYKCKVSNKALPAPIEKTISKAKGQPREPQVYTLPPSRDELTKNQVSLTCLVKGFYPSDIAVEWESNGQPENNYKTTPPVLDSDGSFFLYSKLTVDKSRWQQGNVFSCSVMHEAFSGHYTQKSLSLSPGK

SEQ ID NO: 179 - protein, 227 aa, Artificial Sequence
  Amino acid sequence of Fc variant designated as SEQ ID NO. 179 in description
DKTHTCPPCPAPELLGGPSVFLFPPKPKDHEQQSRTPEVTCVVVDVSHEDPEVKFNWYVDGVEVHNAKTKPREEQYNSTYRVVSVLTVLHQDWLNGKEYKCKVSNKALPAPIEKTISKAKGQPREPQVYTLPPSRDELTKNQVSLTCLVKGFYPSDIAVEWESNGQPENNYKTTPPVLDSDGSFFLYSKLTVDKSRWQQGNVFSCSVMHEAFSGHYTQKSLSLSPGK

SEQ ID NO: 180 - protein, 227 aa, Artificial Sequence
  Amino acid sequence of Fc variant designated as SEQ ID NO. 180 in description
DKTHTCPPCPAPELLGGPSVFLFPPKPKDTLMISRTPEVTCVVVDVSHEDPEVKFNWYVDGVEVHNAKTKPREEQYNSTYRVVSVLTVTPHDWLNGKEYKCKVSNKALPAPIEKTISKAKGQPREPQVYTLPPSRDELTKNQVSLTCLVKGFYPSDIAVEWESNGQPENNYKTTPPVLDSDGSFFLYSKLTVDKSRWQQGNVFSCSVMHEAFSGHYTQKSLSLSPGK

SEQ ID NO: 181 - protein, 227 aa, Artificial Sequence
  Amino acid sequence of Fc variant designated as SEQ ID NO. 181 in description
DKTHTCPPCPAPELLGGPSVFLFPPKPKDARHTSRTPEVTCVVVDVSHEDPEVKFNWYVDGVEVHNAKTKPREEQYNSTYRVVSVLTVLHQDWLNGKEYKCKVSNKALPAPIEKTISKAKGQPREPQVYTLPPSRDELTKNQVSLTCLVKGFYPSDIAVEWESNGQPENNYKTTPPVLDSDGSFFLYSKLTVDKSRWQQGNVFSCSVMHEAFSGHYTQKSLSLSPGK

SEQ ID NO: 182 - protein, 227 aa, Artificial Sequence
  Amino acid sequence of Fc variant designated as SEQ ID NO. 182 in description
DKTHTCPPCPAPELLGGPSVFLFPPKPKDVYQISRTPEVTCVVVDVSHEDPEVKFNWYVDGVEVHNAKTKPREEQYNSTYRVVSVLTVLHQDWLNGKEYKCKVSNKALPAPIEKTISKAKGQPREPQVYTLPPSRDELTKNQVSLTCLVKGFYPSDIAVEWESNGQPENNYKTTPPVLDSDGSFFLYSKLTVDKSRWQQGNVFSCSVMHEAFSGHYTQKSLSLSPGK

SEQ ID NO: 183 - protein, 227 aa, Artificial Sequence
  Amino acid sequence of Fc variant designated as SEQ ID NO. 183 in description
DKTHTCPPCPAPELLGGPSVFLFPPKPKDTLMYHQTPEVTCVVVDVSHEDPEVKFNWYVDGVEVHNAKTKPREEQYNSTYRVVSVLTVLHQDWLNGKEYKCKVSNKALPAPIEKTISKAKGQPREPQVYTLPPSRDELTKNQVSLTCLVKGFYPSDIAVEWESNGQPENNYKTTPPVLDSDGSFFLYSKLTVDKSRWQQGNVFSCSVMHEAFSGHYTQKSLSLSPGK

SEQ ID NO: 184 - protein, 227 aa, Artificial Sequence
  Amino acid sequence of Fc variant designated as SEQ ID NO. 184 in description
DKTHTCPPCPAPELLGGPSVFLFPPKPKDTVFPSRTPEVTCVVVDVSHEDPEVKFNWYVDGVEVHNAKTKPREEQYNSTYRVVSVLTVLHQDWLNGKEYKCKVSNKALPAPIEKTISKAKGQPREPQVYTLPPSRDELTKNQVSLTCLVKGFYPSDIAVEWESNGQPENNYKTTPPVLDSDGSFFLYSKLTVDKSRWQQGNVFSCSVMHEAFSGHYTQKSLSLSPGK

SEQ ID NO: 185 - protein, 227 aa, Artificial Sequence
  Amino acid sequence of Fc variant designated as SEQ ID NO. 185 in description
DKTHTCPPCPAPELLGGPSVFLFPPKPKDRAVSSRTPEVTCVVVDVSHEDPEVKFNWYVDGVEVHNAKTKPREEQYNSTYRVVSVLTVLHQDWLNGKEYKCKVSNKALPAPIEKTISKAKGQPREPQVYTLPPSRDELTKNQVSLTCLVKGFYPSDIAIQQESNGQPENNYKTTPPVLDSDGSFFLYSKLTVDKSRWQQGNVFSCSVMHEALHNHYTQKSLSLSPGK

SEQ ID NO: 186 - protein, 227 aa, Artificial Sequence
  Amino acid sequence of Fc variant designated as SEQ ID NO. 186 in description
DKTHTCPPCPAPELLGGPSVFLFPPKPKDTLMISRTPEVTCVVVDVSHEDPEVKFNWYVDGVEVHNAKTKPREEQYNSTYRVVSVLTVLHQDWLNGKEYKCKVSNKALPAPIEKTISKAKGQPREPQVYTLPPSRDELTKNQVSLTCLVKGFYPSDIAIQQESNGQPENNYKTTPPVLDSDGSFFLYSKLTVDKSRWQQGNVFSCSVMHEALRFHYTQKSLSLSPGK

SEQ ID NO: 187 - protein, 227 aa, Artificial Sequence
  Amino acid sequence of Fc variant designated as SEQ ID NO. 187 in description
DKTHTCPPCPAPELLGGPSVFLFPPKPKDTLMISRTPEVTCVVVDVSHEDPEVKFNWYVDGVEVHNAKTKPREEQYNSTYRVVSVLTVLHQDWLNGKEYKCKVSNKALPAPIEKTISKAKGQPREPQVYTLPPSRDELTKNQVSLTCLVKGFYPSDIAIQQESNGQPENNYKTTPPVLDSDGSFFLYSKLTVDKSRWQQGNVFSCSVMHEALPYHYTQKSLSLSPGK

SEQ ID NO: 188 - protein, 227 aa, Artificial Sequence
  Amino acid sequence of Fc variant designated as SEQ ID NO. 188 in description
DKTHTCPPCPAPELLGGPSVFLFPPKPKDTLMISRTPEVTCVVVDVSHEDPEVKFNWYVDGVEVHNAKTKPREEQYNSTYRVVSVLTVLHQDWLNGKEYKCKVSNKALPAPIEKTISKAKGQPREPQVYTLPPSRDELTKNQVSLTCLVKGFYPSDIAIQQESNGQPENNYKTTPPVLDSDGSFFLYSKLTVDKSRWQQGNVFSCSVMHEAASFHYTQKSLSLSPGK

SEQ ID NO: 189 - protein, 227 aa, Artificial Sequence
  Amino acid sequence of Fc variant designated as SEQ ID NO. 189 in description
DKTHTCPPCPAPELLGGPSVFLFPPKPKDTLMISRTPEVTCVVVDVSHEDPEVKFNWYVDGVEVHNAKTKPREEQYNSTYRVVSVLTVLHQDWLNGKEYKCKVSNKALPAPIEKTISKAKGQPREPQVYTLPPSRDELTKNQVSLTCLVKGFYPSDIAIQQESNGQPENNYKTTPPVLDSDGSFFLYSKLTVDKSRWQQGNVFSCSVMHEALPWHYTQKSLSLSPGK

SEQ ID NO: 190 - protein, 227 aa, Artificial Sequence
  Amino acid sequence of Fc variant designated as SEQ ID NO. 190 in description
DKTHTCPPCPAPELLGGPSVFLFPPKPKDTLMISRTPEVTCVVVDVSHEDPEVKFNWYVDGVEVHNAKTKPREEQYNSTYRVVSVLTVLHQDWLNGKEYKCKVSNKALPAPIEKTISKAKGQPREPQVYTLPPSRDELTKNQVSLTCLVKGFYPSDIAIQQESNGQPENNYKTTPPVLDSDGSFFLYSKLTVDKSRWQQGNVFSCSVMHEAMPFHYTQKSLSLSPGK

SEQ ID NO: 191 - protein, 227 aa, Artificial Sequence
  Amino acid sequence of Fc variant designated as SEQ ID NO. 191 in description
DKTHTCPPCPAPELLGGPSVFLFPPKPKDTLMISRTPEVTCVVVDVSHEDPEVKFNWYVDGVEVHNAKTKPREEQYNSTYRVVSVLTVLHQDWLNGKEYKCKVSNKALPAPIEKTISKAKGQPREPQVYTLPPSRDELTKNQVSLTCLVKGFYPSDIAIQQESNGQPENNYKTTPPVLDSDGSFFLYSKLTVDKSRWQQGNVFSCSVMHEAAKFHYTQKSLSLSPGK

SEQ ID NO: 192 - protein, 227 aa, Artificial Sequence
  Amino acid sequence of Fc variant designated as SEQ ID NO. 192 in description
DKTHTCPPCPAPELLGGPSVFLFPPKPKDALMISRTPEVTCVVVDVSHEDPEVKFNWYVDGVEVHNAKTKPREEQYNSTYRVVSVLYDLHQDWLNGKEYKCKVSNKALPAPIEKTISKAKGQPREPQVYTLPPSRDELTKNQVSLTCLVKGFYPSDIAIQQESNGQPENNYKTTPPVLDSDGSFFLYSKLTVDKSRWQQGNVFSCSVMHEALHNHYTQKSLSLSPGK

SEQ ID NO: 193 - protein, 227 aa, Artificial Sequence
  Amino acid sequence of Fc variant designated as SEQ ID NO. 193 in description
DKTHTCPPCPAPELLGGPSVFLFPPKPKDTLMISRTPEVTCVVVDVSHEDPEVKFNWYVDGVEVHNAKTKPREEQYNSTYRVVSVLQTSHQDWLNGKEYKCKVSNKALPAPIEKTISKAKGQPREPQVYTLPPSRDELTKNQVSLTCLVKGFYPSDIAIQQESNGQPENNYKTTPPVLDSDGSFFLYSKLTVDKSRWQQGNVFSCSVMHEALHNHYTQKSLSLSPGK

SEQ ID NO: 194 - protein, 227 aa, Artificial Sequence
  Amino acid sequence of Fc variant designated as SEQ ID NO. 194 in description
DKTHTCPPCPAPELLGGPSVFLFPPKPKDTLMISRQQYRTCVVVDVSHEDPEVKFNWYVDGVEVHNAKTKPREEQYNSTYRVVSVLTVLHQDWLNGKEYKCKVSNKALPAPIEKTISKAKGQPREPQVYTLPPSRDELTKNQVSLTCLVKGFYPSDIAIQQESNGQPENNYKTTPPVLDSDGSFFLYSKLTVDKSRWQQGNVFSCSVMHEALHNHYTQKSLSLSPGK

SEQ ID NO: 195 - protein, 227 aa, Artificial Sequence
  Amino acid sequence of Fc variant designated as SEQ ID NO. 195 in description
DKTHTCPPCPAPELLGGPSVFLFPPKPKDHEQQSRTPEVTCVVVDVSHEDPEVKFNWYVDGVEVHNAKTKPREEQYNSTYRVVSVLTVLHQDWLNGKEYKCKVSNKALPAPIEKTISKAKGQPREPQVYTLPPSRDELTKNQVSLTCLVKGFYPSDIAIQQESNGQPENNYKTTPPVLDSDGSFFLYSKLTVDKSRWQQGNVFSCSVMHEALHNHYTQKSLSLSPGK

SEQ ID NO: 196 - protein, 227 aa, Artificial Sequence
  Amino acid sequence of Fc variant designated as SEQ ID NO. 196 in description
DKTHTCPPCPAPELLGGPSVFLFPPKPKDTLMISRTPEVTCVVVDVSHEDPEVKFNWYVDGVEVHNAKTKPREEQYNSTYRVVSVLTVTPHDWLNGKEYKCKVSNKALPAPIEKTISKAKGQPREPQVYTLPPSRDELTKNQVSLTCLVKGFYPSDIAIQQESNGQPENNYKTTPPVLDSDGSFFLYSKLTVDKSRWQQGNVFSCSVMHEALHNHYTQKSLSLSPGK

SEQ ID NO: 197 - protein, 227 aa, Artificial Sequence
  Amino acid sequence of Fc variant designated as SEQ ID NO. 197 in description
DKTHTCPPCPAPELLGGPSVFLFPPKPKDTLMISRTPEVTCVVVDVSHEDPEVKFNWYVDGVEVHNAKTKPREEQYNSTYRVVSVLTVLHQDWLNGKEYKCKVSNKALPAPIEKTISKAKGQPREPQVYTLPPSRDELTKNQVSLTCLVKGFYPSDIAIQQESNGQPENNYKTTPPVLDSDGSFFLYSKLTVDKSRWQQGNVFSCSVMHEAMPIPYTQKSLSLSPGK

SEQ ID NO: 198 - protein, 227 aa, Artificial Sequence
  Amino acid sequence of Fc variant designated as SEQ ID NO. 198 in description
DKTHTCPPCPAPELLGGPSVFLFPPKPKDTLMISRTPEVTCVVVDVSHEDPEVKFNWYVDGVEVHNAKTKPREEQYNSTYRVVSVLTVLHQDWLNGKEYKCKVSNKALPAPIEKTISKAKGQPREPQVYTLPPSRDELTKNQVSLTCLVKGFYPSDIAIQQESNGQPENNYKTTPPVLDSDGSFFLYSKLTVDKSRWQQGNVFSCSVMHEAPMQHYTQKSLSLSPGK

SEQ ID NO: 199 - protein, 227 aa, Artificial Sequence
  Amino acid sequence of Fc variant designated as SEQ ID NO. 199 in description
DKTHTCPPCPAPELLGGPSVFLFPPKPKDTLMISRTPEVTCVVVDVSHEDPEVKFNWYVDGVEVHNAKTKPREEQYNSTYRVVSVLTSQVNDWLNGKEYKCKVSNKALPAPIEKTISKAKGQPREPQVYTLPPSRDELTKNQVSLTCLVKGFYPSDIAIQQESNGQPENNYKTTPPVLDSDGSFFLYSKLTVDKSRWQQGNVFSCSVMHEAQNNNYTQKSLSLSPGK

SEQ ID NO: 200 - protein, 227 aa, Artificial Sequence
  Amino acid sequence of Fc variant designated as SEQ ID NO. 200 in description
DKTHTCPPCPAPELLGGPSVFLFPPKPKDAQYRSRTPEVTCVVVDVSHEDPEVKFNWYVDGVEVHNAKTKPREEQYNSTYRVVSVLTVLHQDWLNGKEYKCKVSNKALPAPIEKTISKAKGQPREPQVYTLPPSRDELTKNQVSLTCLVKGFYPSDIAIQQESNGQPENNYKTTPPVLDSDGSFFLYSKLTVDKSRWQQGNVFSCSVMHEAYRLPYTQKSLSLSPGK

SEQ ID NO: 201 - protein, 227 aa, Artificial Sequence
  Amino acid sequence of Fc variant designated as SEQ ID NO. 201 in description
DKTHTCPPCPAPELLGGPSVFLFPPKPKDTLMISRTPWGTCVVVDVSHEDPEVKFNWYVDGVEVHNAKTKPREEQYNSTYRVVSVLTVLHQDWLNGKEYKCKVSNKALPAPIEKTISKAKGQPREPQVYTLPPSRDELTKNQVSLTCLVKGFYPSDIAIQQESNGQPENNYKTTPPVLDSDGSFFLYSKLTVDKSRWQQGNVFSCSVMHEALHTDFNQKSLSLSPGK

SEQ ID NO: 202 - protein, 227 aa, Artificial Sequence
  Amino acid sequence of Fc variant designated as SEQ ID NO. 202 in description
DKTHTCPPCPAPELLGGPSVFLFPPKPKDARHTSRTPEVTCVVVDVSHEDPEVKFNWYVDGVEVHNAKTKPREEQYNSTYRVVSVLTVLHQDWLNGKEYKCKVSNKALPAPIEKTISKAKGQPREPQVYTLPPSRDELTKNQVSLTCLVKGFYPSDIAIQQESNGQPENNYKTTPPVLDSDGSFFLYSKLTVDKSRWQQGNVFSCSVMHEALHNHYTQKSLSLSPGK

SEQ ID NO: 203 - protein, 227 aa, Artificial Sequence
  Amino acid sequence of Fc variant designated as SEQ ID NO. 203 in description
DKTHTCPPCPAPELLGGPSVFLFPPKPKDVYQISRTPEVTCVVVDVSHEDPEVKFNWYVDGVEVHNAKTKPREEQYNSTYRVVSVLTVLHQDWLNGKEYKCKVSNKALPAPIEKTISKAKGQPREPQVYTLPPSRDELTKNQVSLTCLVKGFYPSDIAIQQESNGQPENNYKTTPPVLDSDGSFFLYSKLTVDKSRWQQGNVFSCSVMHEALHNHYTQKSLSLSPGK

SEQ ID NO: 204 - protein, 227 aa, Artificial Sequence
  Amino acid sequence of Fc variant designated as SEQ ID NO. 204 in description
DKTHTCPPCPAPELLGGPSVFLFPPKPKDKCQNSRTPEVTCVVVDVSHEDPEVKFNWYVDGVEVHNAKTKPREEQYNSTYRVVSVLTVLHQDWLNGKEYKCKVSNKALPAPIEKTISKAKGQPREPQVYTLPPSRDELTKNQVSLTCLVKGFYPSDIAIQQESNGQPENNYKTTPPVLDSDGSFFLYSKLTVDKSRWQQGNVFSCSVMHEALHNHYTQKSLSLSPGK

SEQ ID NO: 205 - protein, 227 aa, Artificial Sequence
  Amino acid sequence of Fc variant designated as SEQ ID NO. 205 in description
DKTHTCPPCPAPELLGGPSVFLFPPKPKDTLMYHQTPEVTCVVVDVSHEDPEVKFNWYVDGVEVHNAKTKPREEQYNSTYRVVSVLTVLHQDWLNGKEYKCKVSNKALPAPIEKTISKAKGQPREPQVYTLPPSRDELTKNQVSLTCLVKGFYPSDIAIQQESNGQPENNYKTTPPVLDSDGSFFLYSKLTVDKSRWQQGNVFSCSVMHEALHNHYTQKSLSLSPGK

SEQ ID NO: 206 - protein, 227 aa, Artificial Sequence
  Amino acid sequence of Fc variant designated as SEQ ID NO. 206 in description
DKTHTCPPCPAPELLGGPSVFLFPPKPKDTVFPSRTPEVTCVVVDVSHEDPEVKFNWYVDGVEVHNAKTKPREEQYNSTYRVVSVLTVLHQDWLNGKEYKCKVSNKALPAPIEKTISKAKGQPREPQVYTLPPSRDELTKNQVSLTCLVKGFYPSDIAIQQESNGQPENNYKTTPPVLDSDGSFFLYSKLTVDKSRWQQGNVFSCSVMHEALHNHYTQKSLSLSPGK

SEQ ID NO: 207 - protein, 227 aa, Artificial Sequence
  Amino acid sequence of Fc variant designated as SEQ ID NO. 207 in description
DKTHTCPPCPAPELLGGPSVFLFPPKPKDRAVSSRTPEVTCVVVDVSHEDPEVKFNWYVDGVEVHNAKTKPREEQYNSTYRVVSVLTVLHQDWLNGKEYKCKVSNKALPAPIEKTISKAKGQPREPQVYTLPPSRDELTKNQVSLTCLVKGFYPSDIAVEWESNGQPENNYKTTPPVLDSDGSFFLYSKLTVDKSRWQQGNVFSCSVMHEALRFHYTQKSLSLSPGK

SEQ ID NO: 208 - protein, 227 aa, Artificial Sequence
  Amino acid sequence of Fc variant designated as SEQ ID NO. 208 in description
DKTHTCPPCPAPELLGGPSVFLFPPKPKDRAVSSRTPEVTCVVVDVSHEDPEVKFNWYVDGVEVHNAKTKPREEQYNSTYRVVSVLTVLHQDWLNGKEYKCKVSNKALPAPIEKTISKAKGQPREPQVYTLPPSRDELTKNQVSLTCLVKGFYPSDIAVEWESNGQPENNYKTTPPVLDSDGSFFLYSKLTVDKSRWQQGNVFSCSVMHEALPYHYTQKSLSLSPGK

SEQ ID NO: 209 - protein, 227 aa, Artificial Sequence
  Amino acid sequence of Fc variant designated as SEQ ID NO. 209 in description
DKTHTCPPCPAPELLGGPSVFLFPPKPKDRAVSSRTPEVTCVVVDVSHEDPEVKFNWYVDGVEVHNAKTKPREEQYNSTYRVVSVLTVLHQDWLNGKEYKCKVSNKALPAPIEKTISKAKGQPREPQVYTLPPSRDELTKNQVSLTCLVKGFYPSDIAVEWESNGQPENNYKTTPPVLDSDGSFFLYSKLTVDKSRWQQGNVFSCSVMHEAASFHYTQKSLSLSPGK

SEQ ID NO: 210 - protein, 227 aa, Artificial Sequence
  Amino acid sequence of Fc variant designated as SEQ ID NO. 210 in description
DKTHTCPPCPAPELLGGPSVFLFPPKPKDRAVSSRTPEVTCVVVDVSHEDPEVKFNWYVDGVEVHNAKTKPREEQYNSTYRVVSVLTVLHQDWLNGKEYKCKVSNKALPAPIEKTISKAKGQPREPQVYTLPPSRDELTKNQVSLTCLVKGFYPSDIAVEWESNGQPENNYKTTPPVLDSDGSFFLYSKLTVDKSRWQQGNVFSCSVMHEALPWHYTQKSLSLSPGK

SEQ ID NO: 211 - protein, 227 aa, Artificial Sequence
  Amino acid sequence of Fc variant designated as SEQ ID NO. 211 in description
DKTHTCPPCPAPELLGGPSVFLFPPKPKDRAVSSRTPEVTCVVVDVSHEDPEVKFNWYVDGVEVHNAKTKPREEQYNSTYRVVSVLTVLHQDWLNGKEYKCKVSNKALPAPIEKTISKAKGQPREPQVYTLPPSRDELTKNQVSLTCLVKGFYPSDIAVEWESNGQPENNYKTTPPVLDSDGSFFLYSKLTVDKSRWQQGNVFSCSVMHEAMPFHYTQKSLSLSPGK

SEQ ID NO: 212 - protein, 227 aa, Artificial Sequence
  Amino acid sequence of Fc variant designated as SEQ ID NO. 212 in description
DKTHTCPPCPAPELLGGPSVFLFPPKPKDRAVSSRTPEVTCVVVDVSHEDPEVKFNWYVDGVEVHNAKTKPREEQYNSTYRVVSVLTVLHQDWLNGKEYKCKVSNKALPAPIEKTISKAKGQPREPQVYTLPPSRDELTKNQVSLTCLVKGFYPSDIAVEWESNGQPENNYKTTPPVLDSDGSFFLYSKLTVDKSRWQQGNVFSCSVMHEAAKFHYTQKSLSLSPGK

SEQ ID NO: 213 - protein, 227 aa, Artificial Sequence
  Amino acid sequence of Fc variant designated as SEQ ID NO. 213 in description
DKTHTCPPCPAPELLGGPSVFLFPPKPKDRAVSSRTPEVTCVVVDVSHEDPEVKFNWYVDGVEVHNAKTKPREEQYNSTYRVVSVLQTSHQDWLNGKEYKCKVSNKALPAPIEKTISKAKGQPREPQVYTLPPSRDELTKNQVSLTCLVKGFYPSDIAVEWESNGQPENNYKTTPPVLDSDGSFFLYSKLTVDKSRWQQGNVFSCSVMHEALTHQYTQKSLSLSPGK

SEQ ID NO: 214 - protein, 227 aa, Artificial Sequence
  Amino acid sequence of Fc variant designated as SEQ ID NO. 214 in description
DKTHTCPPCPAPELLGGPSVFLFPPKPKDRAVSSRQQYRTCVVVDVSHEDPEVKFNWYVDGVEVHNAKTKPREEQYNSTYRVVSVLTVLHQDWLNGKEYKCKVSNKALPAPIEKTISKAKGQPREPQVYTLPPSRDELTKNQVSLTCLVKGFYPSDIAVEWESNGQPENNYKTTPPVLDSDGSFFLYSKLTVDKSRWQQGNVFSCSVMHEALTHQYTQKSLSLSPGK

SEQ ID NO: 215 - protein, 227 aa, Artificial Sequence
  Amino acid sequence of Fc variant designated as SEQ ID NO. 215 in description
DKTHTCPPCPAPELLGGPSVFLFPPKPKDRAVSSRTPEVTCVVVDVSHEDPEVKFNWYVDGVEVHNAKTKPREEQYNSTYRVVSVLTVTPHDWLNGKEYKCKVSNKALPAPIEKTISKAKGQPREPQVYTLPPSRDELTKNQVSLTCLVKGFYPSDIAVEWESNGQPENNYKTTPPVLDSDGSFFLYSKLTVDKSRWQQGNVFSCSVMHEALTHQYTQKSLSLSPGK

SEQ ID NO: 216 - protein, 227 aa, Artificial Sequence
  Amino acid sequence of Fc variant designated as SEQ ID NO. 216 in description
DKTHTCPPCPAPELLGGPSVFLFPPKPKDRAVSSRTPEVTCVVVDVSHEDPEVKFNWYVDGVEVHNAKTKPREEQYNSTYRVVSVLTVLHQDWLNGKEYKCKVSNKALPAPIEKTISKAKGQPREPQVYTLPPSRDELTKNQVSLTCLVKGFYPSDIAVEWESNGQPENNYKTTPPVLDSDGSFFLYSKLTVDKSRWQQGNVFSCSVMHEAMPIPYTQKSLSLSPGK

SEQ ID NO: 217 - protein, 227 aa, Artificial Sequence
  Amino acid sequence of Fc variant designated as SEQ ID NO. 217 in description
DKTHTCPPCPAPELLGGPSVFLFPPKPKDRAVSSRTPEVTCVVVDVSHEDPEVKFNWYVDGVEVHNAKTKPREEQYNSTYRVVSVLTVLHQDWLNGKEYKCKVSNKALPAPIEKTISKAKGQPREPQVYTLPPSRDELTKNQVSLTCLVKGFYPSDIAVEWESNGQPENNYKTTPPVLDSDGSFFLYSKLTVDKSRWQQGNVFSCSVMHEAPMQHYTQKSLSLSPGK

SEQ ID NO: 218 - protein, 227 aa, Artificial Sequence
  Amino acid sequence of Fc variant designated as SEQ ID NO. 218 in description
DKTHTCPPCPAPELLGGPSVFLFPPKPKDRAVSSRTPEVTCVVVDVSHEDPEVKFNWYVDGVEVHNAKTKPREEQYNSTYRVVSVLTSQVNDWLNGKEYKCKVSNKALPAPIEKTISKAKGQPREPQVYTLPPSRDELTKNQVSLTCLVKGFYPSDIAVEWESNGQPENNYKTTPPVLDSDGSFFLYSKLTVDKSRWQQGNVFSCSVMHEAQNNNYTQKSLSLSPGK

SEQ ID NO: 219 - protein, 227 aa, Artificial Sequence
  Amino acid sequence of Fc variant designated as SEQ ID NO. 219 in description
DKTHTCPPCPAPELLGGPSVFLFPPKPKDRAVSSRTPWGTCVVVDVSHEDPEVKFNWYVDGVEVHNAKTKPREEQYNSTYRVVSVLTVLHQDWLNGKEYKCKVSNKALPAPIEKTISKAKGQPREPQVYTLPPSRDELTKNQVSLTCLVKGFYPSDIAVEWESNGQPENNYKTTPPVLDSDGSFFLYSKLTVDKSRWQQGNVFSCSVMHEALHTDFNQKSLSLSPGK

SEQ ID NO: 220 - protein, 227 aa, Artificial Sequence
  Amino acid sequence of Fc variant designated as SEQ ID NO. 220 in description
DKTHTCPPCPAPELLGGPSVFLFPPKPKDRAVSHQTPEVTCVVVDVSHEDPEVKFNWYVDGVEVHNAKTKPREEQYNSTYRVVSVLTVLHQDWLNGKEYKCKVSNKALPAPIEKTISKAKGQPREPQVYTLPPSRDELTKNQVSLTCLVKGFYPSDIAVEWESNGQPENNYKTTPPVLDSDGSFFLYSKLTVDKSRWQQGNVFSCSVMHEALHNHYTQKSLSLSPGK

SEQ ID NO: 221 - protein, 227 aa, Artificial Sequence
  Amino acid sequence of Fc variant designated as SEQ ID NO. 221 in description
DKTHTCPPCPAPELLGGPSVFLFPPKPKDALMISRTPEVTCVVVDVSHEDPEVKFNWYVDGVEVHNAKTKPREEQYNSTYRVVSVLYDLHQDWLNGKEYKCKVSNKALPAPIEKTISKAKGQPREPQVYTLPPSRDELTKNQVSLTCLVKGFYPSDIAVEWESNGQPENNYKTTPPVLDSDGSFFLYSKLTVDKSRWQQGNVFSCSVMHEALRFHYTQKSLSLSPGK

SEQ ID NO: 222 - protein, 227 aa, Artificial Sequence
  Amino acid sequence of Fc variant designated as SEQ ID NO. 222 in description
DKTHTCPPCPAPELLGGPSVFLFPPKPKDTLMISRTPEVTCVVVDVSHEDPEVKFNWYVDGVEVHNAKTKPREEQYNSTYRVVSVLQTSHQDWLNGKEYKCKVSNKALPAPIEKTISKAKGQPREPQVYTLPPSRDELTKNQVSLTCLVKGFYPSDIAVEWESNGQPENNYKTTPPVLDSDGSFFLYSKLTVDKSRWQQGNVFSCSVMHEALRFHYTQKSLSLSPGK

SEQ ID NO: 223 - protein, 227 aa, Artificial Sequence
  Amino acid sequence of Fc variant designated as SEQ ID NO. 223 in description
DKTHTCPPCPAPELLGGPSVFLFPPKPKDTLMISRQQYRTCVVVDVSHEDPEVKFNWYVDGVEVHNAKTKPREEQYNSTYRVVSVLTVLHQDWLNGKEYKCKVSNKALPAPIEKTISKAKGQPREPQVYTLPPSRDELTKNQVSLTCLVKGFYPSDIAVEWESNGQPENNYKTTPPVLDSDGSFFLYSKLTVDKSRWQQGNVFSCSVMHEALRFHYTQKSLSLSPGK

SEQ ID NO: 224 - protein, 227 aa, Artificial Sequence
  Amino acid sequence of Fc variant designated as SEQ ID NO. 224 in description
DKTHTCPPCPAPELLGGPSVFLFPPKPKDHEQQSRTPEVTCVVVDVSHEDPEVKFNWYVDGVEVHNAKTKPREEQYNSTYRVVSVLTVLHQDWLNGKEYKCKVSNKALPAPIEKTISKAKGQPREPQVYTLPPSRDELTKNQVSLTCLVKGFYPSDIAVEWESNGQPENNYKTTPPVLDSDGSFFLYSKLTVDKSRWQQGNVFSCSVMHEALRFHYTQKSLSLSPGK

SEQ ID NO: 225 - protein, 227 aa, Artificial Sequence
  Amino acid sequence of Fc variant designated as SEQ ID NO. 225 in description
DKTHTCPPCPAPELLGGPSVFLFPPKPKDTLMISRTPEVTCVVVDVSHEDPEVKFNWYVDGVEVHNAKTKPREEQYNSTYRVVSVLTVTPHDWLNGKEYKCKVSNKALPAPIEKTISKAKGQPREPQVYTLPPSRDELTKNQVSLTCLVKGFYPSDIAVEWESNGQPENNYKTTPPVLDSDGSFFLYSKLTVDKSRWQQGNVFSCSVMHEALRFHYTQKSLSLSPGK

SEQ ID NO: 226 - protein, 227 aa, Artificial Sequence
  Amino acid sequence of Fc variant designated as SEQ ID NO. 226 in description
DKTHTCPPCPAPELLGGPSVFLFPPKPKDARHTSRTPEVTCVVVDVSHEDPEVKFNWYVDGVEVHNAKTKPREEQYNSTYRVVSVLTVLHQDWLNGKEYKCKVSNKALPAPIEKTISKAKGQPREPQVYTLPPSRDELTKNQVSLTCLVKGFYPSDIAVEWESNGQPENNYKTTPPVLDSDGSFFLYSKLTVDKSRWQQGNVFSCSVMHEALRFHYTQKSLSLSPGK

SEQ ID NO: 227 - protein, 227 aa, Artificial Sequence
  Amino acid sequence of Fc variant designated as SEQ ID NO. 227 in description
DKTHTCPPCPAPELLGGPSVFLFPPKPKDVYQISRTPEVTCVVVDVSHEDPEVKFNWYVDGVEVHNAKTKPREEQYNSTYRVVSVLTVLHQDWLNGKEYKCKVSNKALPAPIEKTISKAKGQPREPQVYTLPPSRDELTKNQVSLTCLVKGFYPSDIAVEWESNGQPENNYKTTPPVLDSDGSFFLYSKLTVDKSRWQQGNVFSCSVMHEALRFHYTQKSLSLSPGK

SEQ ID NO: 228 - protein, 227 aa, Artificial Sequence
  Amino acid sequence of Fc variant designated as SEQ ID NO. 228 in description
DKTHTCPPCPAPELLGGPSVFLFPPKPKDKCQNSRTPEVTCVVVDVSHEDPEVKFNWYVDGVEVHNAKTKPREEQYNSTYRVVSVLTVLHQDWLNGKEYKCKVSNKALPAPIEKTISKAKGQPREPQVYTLPPSRDELTKNQVSLTCLVKGFYPSDIAVEWESNGQPENNYKTTPPVLDSDGSFFLYSKLTVDKSRWQQGNVFSCSVMHEALRFHYTQKSLSLSPGK

SEQ ID NO: 229 - protein, 227 aa, Artificial Sequence
  Amino acid sequence of Fc variant designated as SEQ ID NO. 229 in description
DKTHTCPPCPAPELLGGPSVFLFPPKPKDTLMYHQTPEVTCVVVDVSHEDPEVKFNWYVDGVEVHNAKTKPREEQYNSTYRVVSVLTVLHQDWLNGKEYKCKVSNKALPAPIEKTISKAKGQPREPQVYTLPPSRDELTKNQVSLTCLVKGFYPSDIAVEWESNGQPENNYKTTPPVLDSDGSFFLYSKLTVDKSRWQQGNVFSCSVMHEALRFHYTQKSLSLSPGK

SEQ ID NO: 230 - protein, 227 aa, Artificial Sequence
  Amino acid sequence of Fc variant designated as SEQ ID NO. 230 in description
DKTHTCPPCPAPELLGGPSVFLFPPKPKDTVFPSRTPEVTCVVVDVSHEDPEVKFNWYVDGVEVHNAKTKPREEQYNSTYRVVSVLTVLHQDWLNGKEYKCKVSNKALPAPIEKTISKAKGQPREPQVYTLPPSRDELTKNQVSLTCLVKGFYPSDIAVEWESNGQPENNYKTTPPVLDSDGSFFLYSKLTVDKSRWQQGNVFSCSVMHEALRFHYTQKSLSLSPGK

SEQ ID NO: 231 - protein, 227 aa, Artificial Sequence
  Amino acid sequence of Fc variant designated as SEQ ID NO. 231 in description
DKTHTCPPCPAPELLGGPSVFLFPPKPKDALMISRTPEVTCVVVDVSHEDPEVKFNWYVDGVEVHNAKTKPREEQYNSTYRVVSVLYDLHQDWLNGKEYKCKVSNKALPAPIEKTISKAKGQPREPQVYTLPPSRDELTKNQVSLTCLVKGFYPSDIAVEWESNGQPENNYKTTPPVLDSDGSFFLYSKLTVDKSRWQQGNVFSCSVMHEALPYHYTQKSLSLSPGK

SEQ ID NO: 232 - protein, 227 aa, Artificial Sequence
  Amino acid sequence of Fc variant designated as SEQ ID NO. 232 in description
DKTHTCPPCPAPELLGGPSVFLFPPKPKDTLMISRTPEVTCVVVDVSHEDPEVKFNWYVDGVEVHNAKTKPREEQYNSTYRVVSVLQTSHQDWLNGKEYKCKVSNKALPAPIEKTISKAKGQPREPQVYTLPPSRDELTKNQVSLTCLVKGFYPSDIAVEWESNGQPENNYKTTPPVLDSDGSFFLYSKLTVDKSRWQQGNVFSCSVMHEALPYHYTQKSLSLSPGK

SEQ ID NO: 233 - protein, 227 aa, Artificial Sequence
  Amino acid sequence of Fc variant designated as SEQ ID NO. 233 in description
DKTHTCPPCPAPELLGGPSVFLFPPKPKDTLMISRQQYRTCVVVDVSHEDPEVKFNWYVDGVEVHNAKTKPREEQYNSTYRVVSVLTVLHQDWLNGKEYKCKVSNKALPAPIEKTISKAKGQPREPQVYTLPPSRDELTKNQVSLTCLVKGFYPSDIAVEWESNGQPENNYKTTPPVLDSDGSFFLYSKLTVDKSRWQQGNVFSCSVMHEALPYHYTQKSLSLSPGK

SEQ ID NO: 234 - protein, 227 aa, Artificial Sequence
  Amino acid sequence of Fc variant designated as SEQ ID NO. 234 in description
DKTHTCPPCPAPELLGGPSVFLFPPKPKDHEQQSRTPEVTCVVVDVSHEDPEVKFNWYVDGVEVHNAKTKPREEQYNSTYRVVSVLTVLHQDWLNGKEYKCKVSNKALPAPIEKTISKAKGQPREPQVYTLPPSRDELTKNQVSLTCLVKGFYPSDIAVEWESNGQPENNYKTTPPVLDSDGSFFLYSKLTVDKSRWQQGNVFSCSVMHEALPYHYTQKSLSLSPGK

SEQ ID NO: 235 - protein, 227 aa, Artificial Sequence
  Amino acid sequence of Fc variant designated as SEQ ID NO. 235 in description
DKTHTCPPCPAPELLGGPSVFLFPPKPKDTLMISRTPEVTCVVVDVSHEDPEVKFNWYVDGVEVHNAKTKPREEQYNSTYRVVSVLTVTPHDWLNGKEYKCKVSNKALPAPIEKTISKAKGQPREPQVYTLPPSRDELTKNQVSLTCLVKGFYPSDIAVEWESNGQPENNYKTTPPVLDSDGSFFLYSKLTVDKSRWQQGNVFSCSVMHEALPYHYTQKSLSLSPGK

SEQ ID NO: 236 - protein, 227 aa, Artificial Sequence
  Amino acid sequence of Fc variant designated as SEQ ID NO. 236 in description
DKTHTCPPCPAPELLGGPSVFLFPPKPKDARHTSRTPEVTCVVVDVSHEDPEVKFNWYVDGVEVHNAKTKPREEQYNSTYRVVSVLTVLHQDWLNGKEYKCKVSNKALPAPIEKTISKAKGQPREPQVYTLPPSRDELTKNQVSLTCLVKGFYPSDIAVEWESNGQPENNYKTTPPVLDSDGSFFLYSKLTVDKSRWQQGNVFSCSVMHEALPYHYTQKSLSLSPGK

SEQ ID NO: 237 - protein, 227 aa, Artificial Sequence
  Amino acid sequence of Fc variant designated as SEQ ID NO. 237 in description
DKTHTCPPCPAPELLGGPSVFLFPPKPKDVYQISRTPEVTCVVVDVSHEDPEVKFNWYVDGVEVHNAKTKPREEQYNSTYRVVSVLTVLHQDWLNGKEYKCKVSNKALPAPIEKTISKAKGQPREPQVYTLPPSRDELTKNQVSLTCLVKGFYPSDIAVEWESNGQPENNYKTTPPVLDSDGSFFLYSKLTVDKSRWQQGNVFSCSVMHEALPYHYTQKSLSLSPGK

SEQ ID NO: 238 - protein, 227 aa, Artificial Sequence
  Amino acid sequence of Fc variant designated as SEQ ID NO. 238 in description
DKTHTCPPCPAPELLGGPSVFLFPPKPKDKCQNSRTPEVTCVVVDVSHEDPEVKFNWYVDGVEVHNAKTKPREEQYNSTYRVVSVLTVLHQDWLNGKEYKCKVSNKALPAPIEKTISKAKGQPREPQVYTLPPSRDELTKNQVSLTCLVKGFYPSDIAVEWESNGQPENNYKTTPPVLDSDGSFFLYSKLTVDKSRWQQGNVFSCSVMHEALPYHYTQKSLSLSPGK

SEQ ID NO: 239 - protein, 227 aa, Artificial Sequence
  Amino acid sequence of Fc variant designated as SEQ ID NO. 239 in description
DKTHTCPPCPAPELLGGPSVFLFPPKPKDTLMYHQTPEVTCVVVDVSHEDPEVKFNWYVDGVEVHNAKTKPREEQYNSTYRVVSVLTVLHQDWLNGKEYKCKVSNKALPAPIEKTISKAKGQPREPQVYTLPPSRDELTKNQVSLTCLVKGFYPSDIAVEWESNGQPENNYKTTPPVLDSDGSFFLYSKLTVDKSRWQQGNVFSCSVMHEALPYHYTQKSLSLSPGK

SEQ ID NO: 240 - protein, 227 aa, Artificial Sequence
  Amino acid sequence of Fc variant designated as SEQ ID NO. 240 in description
DKTHTCPPCPAPELLGGPSVFLFPPKPKDTVFPSRTPEVTCVVVDVSHEDPEVKFNWYVDGVEVHNAKTKPREEQYNSTYRVVSVLTVLHQDWLNGKEYKCKVSNKALPAPIEKTISKAKGQPREPQVYTLPPSRDELTKNQVSLTCLVKGFYPSDIAVEWESNGQPENNYKTTPPVLDSDGSFFLYSKLTVDKSRWQQGNVFSCSVMHEALPYHYTQKSLSLSPGK

SEQ ID NO: 241 - protein, 227 aa, Artificial Sequence
  Amino acid sequence of Fc variant designated as SEQ ID NO. 241 in description
DKTHTCPPCPAPELLGGPSVFLFPPKPKDALMISRTPEVTCVVVDVSHEDPEVKFNWYVDGVEVHNAKTKPREEQYNSTYRVVSVLYDLHQDWLNGKEYKCKVSNKALPAPIEKTISKAKGQPREPQVYTLPPSRDELTKNQVSLTCLVKGFYPSDIAVEWESNGQPENNYKTTPPVLDSDGSFFLYSKLTVDKSRWQQGNVFSCSVMHEAASFHYTQKSLSLSPGK

SEQ ID NO: 242 - protein, 227 aa, Artificial Sequence
  Amino acid sequence of Fc variant designated as SEQ ID NO. 242 in description
DKTHTCPPCPAPELLGGPSVFLFPPKPKDTLMISRTPEVTCVVVDVSHEDPEVKFNWYVDGVEVHNAKTKPREEQYNSTYRVVSVLQTSHQDWLNGKEYKCKVSNKALPAPIEKTISKAKGQPREPQVYTLPPSRDELTKNQVSLTCLVKGFYPSDIAVEWESNGQPENNYKTTPPVLDSDGSFFLYSKLTVDKSRWQQGNVFSCSVMHEAASFHYTQKSLSLSPGK

SEQ ID NO: 243 - protein, 227 aa, Artificial Sequence
  Amino acid sequence of Fc variant designated as SEQ ID NO. 243 in description
DKTHTCPPCPAPELLGGPSVFLFPPKPKDTLMISRQQYRTCVVVDVSHEDPEVKFNWYVDGVEVHNAKTKPREEQYNSTYRVVSVLTVLHQDWLNGKEYKCKVSNKALPAPIEKTISKAKGQPREPQVYTLPPSRDELTKNQVSLTCLVKGFYPSDIAVEWESNGQPENNYKTTPPVLDSDGSFFLYSKLTVDKSRWQQGNVFSCSVMHEAASFHYTQKSLSLSPGK

SEQ ID NO: 244 - protein, 227 aa, Artificial Sequence
  Amino acid sequence of Fc variant designated as SEQ ID NO. 244 in description
DKTHTCPPCPAPELLGGPSVFLFPPKPKDHEQQSRTPEVTCVVVDVSHEDPEVKFNWYVDGVEVHNAKTKPREEQYNSTYRVVSVLTVLHQDWLNGKEYKCKVSNKALPAPIEKTISKAKGQPREPQVYTLPPSRDELTKNQVSLTCLVKGFYPSDIAVEWESNGQPENNYKTTPPVLDSDGSFFLYSKLTVDKSRWQQGNVFSCSVMHEAASFHYTQKSLSLSPGK

SEQ ID NO: 245 - protein, 227 aa, Artificial Sequence
  Amino acid sequence of Fc variant designated as SEQ ID NO. 245 in description
DKTHTCPPCPAPELLGGPSVFLFPPKPKDTLMISRTPEVTCVVVDVSHEDPEVKFNWYVDGVEVHNAKTKPREEQYNSTYRVVSVLTVTPHDWLNGKEYKCKVSNKALPAPIEKTISKAKGQPREPQVYTLPPSRDELTKNQVSLTCLVKGFYPSDIAVEWESNGQPENNYKTTPPVLDSDGSFFLYSKLTVDKSRWQQGNVFSCSVMHEAASFHYTQKSLSLSPGK

SEQ ID NO: 246 - protein, 227 aa, Artificial Sequence
  Amino acid sequence of Fc variant designated as SEQ ID NO. 246 in description
DKTHTCPPCPAPELLGGPSVFLFPPKPKDARHTSRTPEVTCVVVDVSHEDPEVKFNWYVDGVEVHNAKTKPREEQYNSTYRVVSVLTVLHQDWLNGKEYKCKVSNKALPAPIEKTISKAKGQPREPQVYTLPPSRDELTKNQVSLTCLVKGFYPSDIAVEWESNGQPENNYKTTPPVLDSDGSFFLYSKLTVDKSRWQQGNVFSCSVMHEAASFHYTQKSLSLSPGK

SEQ ID NO: 247 - protein, 227 aa, Artificial Sequence
  Amino acid sequence of Fc variant designated as SEQ ID NO. 247 in description
DKTHTCPPCPAPELLGGPSVFLFPPKPKDVYQISRTPEVTCVVVDVSHEDPEVKFNWYVDGVEVHNAKTKPREEQYNSTYRVVSVLTVLHQDWLNGKEYKCKVSNKALPAPIEKTISKAKGQPREPQVYTLPPSRDELTKNQVSLTCLVKGFYPSDIAVEWESNGQPENNYKTTPPVLDSDGSFFLYSKLTVDKSRWQQGNVFSCSVMHEAASFHYTQKSLSLSPGK

SEQ ID NO: 248 - protein, 227 aa, Artificial Sequence
  Amino acid sequence of Fc variant designated as SEQ ID NO. 248 in description
DKTHTCPPCPAPELLGGPSVFLFPPKPKDKCQNSRTPEVTCVVVDVSHEDPEVKFNWYVDGVEVHNAKTKPREEQYNSTYRVVSVLTVLHQDWLNGKEYKCKVSNKALPAPIEKTISKAKGQPREPQVYTLPPSRDELTKNQVSLTCLVKGFYPSDIAVEWESNGQPENNYKTTPPVLDSDGSFFLYSKLTVDKSRWQQGNVFSCSVMHEAASFHYTQKSLSLSPGK

SEQ ID NO: 249 - protein, 227 aa, Artificial Sequence
  Amino acid sequence of Fc variant designated as SEQ ID NO. 249 in description
DKTHTCPPCPAPELLGGPSVFLFPPKPKDTLMYHQTPEVTCVVVDVSHEDPEVKFNWYVDGVEVHNAKTKPREEQYNSTYRVVSVLTVLHQDWLNGKEYKCKVSNKALPAPIEKTISKAKGQPREPQVYTLPPSRDELTKNQVSLTCLVKGFYPSDIAVEWESNGQPENNYKTTPPVLDSDGSFFLYSKLTVDKSRWQQGNVFSCSVMHEAASFHYTQKSLSLSPGK

SEQ ID NO: 250 - protein, 227 aa, Artificial Sequence
  Amino acid sequence of Fc variant designated as SEQ ID NO. 250 in description
DKTHTCPPCPAPELLGGPSVFLFPPKPKDTVFPSRTPEVTCVVVDVSHEDPEVKFNWYVDGVEVHNAKTKPREEQYNSTYRVVSVLTVLHQDWLNGKEYKCKVSNKALPAPIEKTISKAKGQPREPQVYTLPPSRDELTKNQVSLTCLVKGFYPSDIAVEWESNGQPENNYKTTPPVLDSDGSFFLYSKLTVDKSRWQQGNVFSCSVMHEAASFHYTQKSLSLSPGK

SEQ ID NO: 251 - protein, 227 aa, Artificial Sequence
  Amino acid sequence of Fc variant designated as SEQ ID NO. 251 in description
DKTHTCPPCPAPELLGGPSVFLFPPKPKDALMISRTPEVTCVVVDVSHEDPEVKFNWYVDGVEVHNAKTKPREEQYNSTYRVVSVLYDLHQDWLNGKEYKCKVSNKALPAPIEKTISKAKGQPREPQVYTLPPSRDELTKNQVSLTCLVKGFYPSDIAVEWESNGQPENNYKTTPPVLDSDGSFFLYSKLTVDKSRWQQGNVFSCSVMHEALPWHYTQKSLSLSPGK

SEQ ID NO: 252 - protein, 227 aa, Artificial Sequence
  Amino acid sequence of Fc variant designated as SEQ ID NO. 252 in description
DKTHTCPPCPAPELLGGPSVFLFPPKPKDTLMISRTPEVTCVVVDVSHEDPEVKFNWYVDGVEVHNAKTKPREEQYNSTYRVVSVLQTSHQDWLNGKEYKCKVSNKALPAPIEKTISKAKGQPREPQVYTLPPSRDELTKNQVSLTCLVKGFYPSDIAVEWESNGQPENNYKTTPPVLDSDGSFFLYSKLTVDKSRWQQGNVFSCSVMHEALPWHYTQKSLSLSPGK

SEQ ID NO: 253 - protein, 227 aa, Artificial Sequence
  Amino acid sequence of Fc variant designated as SEQ ID NO. 253 in description
DKTHTCPPCPAPELLGGPSVFLFPPKPKDTLMISRQQYRTCVVVDVSHEDPEVKFNWYVDGVEVHNAKTKPREEQYNSTYRVVSVLTVLHQDWLNGKEYKCKVSNKALPAPIEKTISKAKGQPREPQVYTLPPSRDELTKNQVSLTCLVKGFYPSDIAVEWESNGQPENNYKTTPPVLDSDGSFFLYSKLTVDKSRWQQGNVFSCSVMHEALPWHYTQKSLSLSPGK

SEQ ID NO: 254 - protein, 227 aa, Artificial Sequence
  Amino acid sequence of Fc variant designated as SEQ ID NO. 254 in description
DKTHTCPPCPAPELLGGPSVFLFPPKPKDHEQQSRTPEVTCVVVDVSHEDPEVKFNWYVDGVEVHNAKTKPREEQYNSTYRVVSVLTVLHQDWLNGKEYKCKVSNKALPAPIEKTISKAKGQPREPQVYTLPPSRDELTKNQVSLTCLVKGFYPSDIAVEWESNGQPENNYKTTPPVLDSDGSFFLYSKLTVDKSRWQQGNVFSCSVMHEALPWHYTQKSLSLSPGK

SEQ ID NO: 255 - protein, 227 aa, Artificial Sequence
  Amino acid sequence of Fc variant designated as SEQ ID NO. 255 in description
DKTHTCPPCPAPELLGGPSVFLFPPKPKDTLMISRTPEVTCVVVDVSHEDPEVKFNWYVDGVEVHNAKTKPREEQYNSTYRVVSVLTVTPHDWLNGKEYKCKVSNKALPAPIEKTISKAKGQPREPQVYTLPPSRDELTKNQVSLTCLVKGFYPSDIAVEWESNGQPENNYKTTPPVLDSDGSFFLYSKLTVDKSRWQQGNVFSCSVMHEALPWHYTQKSLSLSPGK

SEQ ID NO: 256 - protein, 227 aa, Artificial Sequence
  Amino acid sequence of Fc variant designated as SEQ ID NO. 256 in description
DKTHTCPPCPAPELLGGPSVFLFPPKPKDARHTSRTPEVTCVVVDVSHEDPEVKFNWYVDGVEVHNAKTKPREEQYNSTYRVVSVLTVLHQDWLNGKEYKCKVSNKALPAPIEKTISKAKGQPREPQVYTLPPSRDELTKNQVSLTCLVKGFYPSDIAVEWESNGQPENNYKTTPPVLDSDGSFFLYSKLTVDKSRWQQGNVFSCSVMHEALPWHYTQKSLSLSPGK

SEQ ID NO: 257 - protein, 227 aa, Artificial Sequence
  Amino acid sequence of Fc variant designated as SEQ ID NO. 257 in description
DKTHTCPPCPAPELLGGPSVFLFPPKPKDVYQISRTPEVTCVVVDVSHEDPEVKFNWYVDGVEVHNAKTKPREEQYNSTYRVVSVLTVLHQDWLNGKEYKCKVSNKALPAPIEKTISKAKGQPREPQVYTLPPSRDELTKNQVSLTCLVKGFYPSDIAVEWESNGQPENNYKTTPPVLDSDGSFFLYSKLTVDKSRWQQGNVFSCSVMHEALPWHYTQKSLSLSPGK

SEQ ID NO: 258 - protein, 227 aa, Artificial Sequence
  Amino acid sequence of Fc variant designated as SEQ ID NO. 258 in description
DKTHTCPPCPAPELLGGPSVFLFPPKPKDKCQNSRTPEVTCVVVDVSHEDPEVKFNWYVDGVEVHNAKTKPREEQYNSTYRVVSVLTVLHQDWLNGKEYKCKVSNKALPAPIEKTISKAKGQPREPQVYTLPPSRDELTKNQVSLTCLVKGFYPSDIAVEWESNGQPENNYKTTPPVLDSDGSFFLYSKLTVDKSRWQQGNVFSCSVMHEALPWHYTQKSLSLSPGK

SEQ ID NO: 259 - protein, 227 aa, Artificial Sequence
  Amino acid sequence of Fc variant designated as SEQ ID NO. 259 in description
DKTHTCPPCPAPELLGGPSVFLFPPKPKDTLMYHQTPEVTCVVVDVSHEDPEVKFNWYVDGVEVHNAKTKPREEQYNSTYRVVSVLTVLHQDWLNGKEYKCKVSNKALPAPIEKTISKAKGQPREPQVYTLPPSRDELTKNQVSLTCLVKGFYPSDIAVEWESNGQPENNYKTTPPVLDSDGSFFLYSKLTVDKSRWQQGNVFSCSVMHEALPWHYTQKSLSLSPGK

SEQ ID NO: 260 - protein, 227 aa, Artificial Sequence
  Amino acid sequence of Fc variant designated as SEQ ID NO. 260 in description
DKTHTCPPCPAPELLGGPSVFLFPPKPKDTVFPSRTPEVTCVVVDVSHEDPEVKFNWYVDGVEVHNAKTKPREEQYNSTYRVVSVLTVLHQDWLNGKEYKCKVSNKALPAPIEKTISKAKGQPREPQVYTLPPSRDELTKNQVSLTCLVKGFYPSDIAVEWESNGQPENNYKTTPPVLDSDGSFFLYSKLTVDKSRWQQGNVFSCSVMHEALPWHYTQKSLSLSPGK

SEQ ID NO: 261 - protein, 227 aa, Artificial Sequence
  Amino acid sequence of Fc variant designated as SEQ ID NO. 261 in description
DKTHTCPPCPAPELLGGPSVFLFPPKPKDALMISRTPEVTCVVVDVSHEDPEVKFNWYVDGVEVHNAKTKPREEQYNSTYRVVSVLYDLHQDWLNGKEYKCKVSNKALPAPIEKTISKAKGQPREPQVYTLPPSRDELTKNQVSLTCLVKGFYPSDIAVEWESNGQPENNYKTTPPVLDSDGSFFLYSKLTVDKSRWQQGNVFSCSVMHEAMPFHYTQKSLSLSPGK

SEQ ID NO: 262 - protein, 227 aa, Artificial Sequence
  Amino acid sequence of Fc variant designated as SEQ ID NO. 262 in description
DKTHTCPPCPAPELLGGPSVFLFPPKPKDTLMISRTPEVTCVVVDVSHEDPEVKFNWYVDGVEVHNAKTKPREEQYNSTYRVVSVLQTSHQDWLNGKEYKCKVSNKALPAPIEKTISKAKGQPREPQVYTLPPSRDELTKNQVSLTCLVKGFYPSDIAVEWESNGQPENNYKTTPPVLDSDGSFFLYSKLTVDKSRWQQGNVFSCSVMHEAMPFHYTQKSLSLSPGK

SEQ ID NO: 263 - protein, 227 aa, Artificial Sequence
  Amino acid sequence of Fc variant designated as SEQ ID NO. 263 in description
DKTHTCPPCPAPELLGGPSVFLFPPKPKDTLMISRQQYRTCVVVDVSHEDPEVKFNWYVDGVEVHNAKTKPREEQYNSTYRVVSVLTVLHQDWLNGKEYKCKVSNKALPAPIEKTISKAKGQPREPQVYTLPPSRDELTKNQVSLTCLVKGFYPSDIAVEWESNGQPENNYKTTPPVLDSDGSFFLYSKLTVDKSRWQQGNVFSCSVMHEAMPFHYTQKSLSLSPGK

SEQ ID NO: 264 - protein, 227 aa, Artificial Sequence
  Amino acid sequence of Fc variant designated as SEQ ID NO. 264 in description
DKTHTCPPCPAPELLGGPSVFLFPPKPKDHEQQSRTPEVTCVVVDVSHEDPEVKFNWYVDGVEVHNAKTKPREEQYNSTYRVVSVLTVLHQDWLNGKEYKCKVSNKALPAPIEKTISKAKGQPREPQVYTLPPSRDELTKNQVSLTCLVKGFYPSDIAVEWESNGQPENNYKTTPPVLDSDGSFFLYSKLTVDKSRWQQGNVFSCSVMHEAMPFHYTQKSLSLSPGK

SEQ ID NO: 265 - protein, 227 aa, Artificial Sequence
  Amino acid sequence of Fc variant designated as SEQ ID NO. 265 in description
DKTHTCPPCPAPELLGGPSVFLFPPKPKDTLMISRTPEVTCVVVDVSHEDPEVKFNWYVDGVEVHNAKTKPREEQYNSTYRVVSVLTVTPHDWLNGKEYKCKVSNKALPAPIEKTISKAKGQPREPQVYTLPPSRDELTKNQVSLTCLVKGFYPSDIAVEWESNGQPENNYKTTPPVLDSDGSFFLYSKLTVDKSRWQQGNVFSCSVMHEAMPFHYTQKSLSLSPGK

SEQ ID NO: 266 - protein, 227 aa, Artificial Sequence
  Amino acid sequence of Fc variant designated as SEQ ID NO. 266 in description
DKTHTCPPCPAPELLGGPSVFLFPPKPKDARHTSRTPEVTCVVVDVSHEDPEVKFNWYVDGVEVHNAKTKPREEQYNSTYRVVSVLTVLHQDWLNGKEYKCKVSNKALPAPIEKTISKAKGQPREPQVYTLPPSRDELTKNQVSLTCLVKGFYPSDIAVEWESNGQPENNYKTTPPVLDSDGSFFLYSKLTVDKSRWQQGNVFSCSVMHEAMPFHYTQKSLSLSPGK

SEQ ID NO: 267 - protein, 227 aa, Artificial Sequence
  Amino acid sequence of Fc variant designated as SEQ ID NO. 267 in description
DKTHTCPPCPAPELLGGPSVFLFPPKPKDVYQISRTPEVTCVVVDVSHEDPEVKFNWYVDGVEVHNAKTKPREEQYNSTYRVVSVLTVLHQDWLNGKEYKCKVSNKALPAPIEKTISKAKGQPREPQVYTLPPSRDELTKNQVSLTCLVKGFYPSDIAVEWESNGQPENNYKTTPPVLDSDGSFFLYSKLTVDKSRWQQGNVFSCSVMHEAMPFHYTQKSLSLSPGK

SEQ ID NO: 268 - protein, 227 aa, Artificial Sequence
  Amino acid sequence of Fc variant designated as SEQ ID NO. 268 in description
DKTHTCPPCPAPELLGGPSVFLFPPKPKDKCQNSRTPEVTCVVVDVSHEDPEVKFNWYVDGVEVHNAKTKPREEQYNSTYRVVSVLTVLHQDWLNGKEYKCKVSNKALPAPIEKTISKAKGQPREPQVYTLPPSRDELTKNQVSLTCLVKGFYPSDIAVEWESNGQPENNYKTTPPVLDSDGSFFLYSKLTVDKSRWQQGNVFSCSVMHEAMPFHYTQKSLSLSPGK

SEQ ID NO: 269 - protein, 227 aa, Artificial Sequence
  Amino acid sequence of Fc variant designated as SEQ ID NO. 269 in description
DKTHTCPPCPAPELLGGPSVFLFPPKPKDTLMYHQTPEVTCVVVDVSHEDPEVKFNWYVDGVEVHNAKTKPREEQYNSTYRVVSVLTVLHQDWLNGKEYKCKVSNKALPAPIEKTISKAKGQPREPQVYTLPPSRDELTKNQVSLTCLVKGFYPSDIAVEWESNGQPENNYKTTPPVLDSDGSFFLYSKLTVDKSRWQQGNVFSCSVMHEAMPFHYTQKSLSLSPGK

SEQ ID NO: 270 - protein, 227 aa, Artificial Sequence
  Amino acid sequence of Fc variant designated as SEQ ID NO. 270 in description
DKTHTCPPCPAPELLGGPSVFLFPPKPKDTVFPSRTPEVTCVVVDVSHEDPEVKFNWYVDGVEVHNAKTKPREEQYNSTYRVVSVLTVLHQDWLNGKEYKCKVSNKALPAPIEKTISKAKGQPREPQVYTLPPSRDELTKNQVSLTCLVKGFYPSDIAVEWESNGQPENNYKTTPPVLDSDGSFFLYSKLTVDKSRWQQGNVFSCSVMHEAMPFHYTQKSLSLSPGK

SEQ ID NO: 271 - protein, 227 aa, Artificial Sequence
  Amino acid sequence of Fc variant designated as SEQ ID NO. 271 in description
DKTHTCPPCPAPELLGGPSVFLFPPKPKDALMISRTPEVTCVVVDVSHEDPEVKFNWYVDGVEVHNAKTKPREEQYNSTYRVVSVLYDLHQDWLNGKEYKCKVSNKALPAPIEKTISKAKGQPREPQVYTLPPSRDELTKNQVSLTCLVKGFYPSDIAVEWESNGQPENNYKTTPPVLDSDGSFFLYSKLTVDKSRWQQGNVFSCSVMHEAAKFHYTQKSLSLSPGK

SEQ ID NO: 272 - protein, 227 aa, Artificial Sequence
  Amino acid sequence of Fc variant designated as SEQ ID NO. 272 in description
DKTHTCPPCPAPELLGGPSVFLFPPKPKDTLMISRTPEVTCVVVDVSHEDPEVKFNWYVDGVEVHNAKTKPREEQYNSTYRVVSVLQTSHQDWLNGKEYKCKVSNKALPAPIEKTISKAKGQPREPQVYTLPPSRDELTKNQVSLTCLVKGFYPSDIAVEWESNGQPENNYKTTPPVLDSDGSFFLYSKLTVDKSRWQQGNVFSCSVMHEAAKFHYTQKSLSLSPGK

SEQ ID NO: 273 - protein, 227 aa, Artificial Sequence
  Amino acid sequence of Fc variant designated as SEQ ID NO. 273 in description
DKTHTCPPCPAPELLGGPSVFLFPPKPKDTLMISRQQYRTCVVVDVSHEDPEVKFNWYVDGVEVHNAKTKPREEQYNSTYRVVSVLTVLHQDWLNGKEYKCKVSNKALPAPIEKTISKAKGQPREPQVYTLPPSRDELTKNQVSLTCLVKGFYPSDIAVEWESNGQPENNYKTTPPVLDSDGSFFLYSKLTVDKSRWQQGNVFSCSVMHEAAKFHYTQKSLSLSPGK

SEQ ID NO: 274 - protein, 227 aa, Artificial Sequence
  Amino acid sequence of Fc variant designated as SEQ ID NO. 274 in description
DKTHTCPPCPAPELLGGPSVFLFPPKPKDHEQQSRTPEVTCVVVDVSHEDPEVKFNWYVDGVEVHNAKTKPREEQYNSTYRVVSVLTVLHQDWLNGKEYKCKVSNKALPAPIEKTISKAKGQPREPQVYTLPPSRDELTKNQVSLTCLVKGFYPSDIAVEWESNGQPENNYKTTPPVLDSDGSFFLYSKLTVDKSRWQQGNVFSCSVMHEAAKFHYTQKSLSLSPGK

SEQ ID NO: 275 - protein, 227 aa, Artificial Sequence
  Amino acid sequence of Fc variant designated as SEQ ID NO. 275 in description
DKTHTCPPCPAPELLGGPSVFLFPPKPKDTLMISRTPEVTCVVVDVSHEDPEVKFNWYVDGVEVHNAKTKPREEQYNSTYRVVSVLTVTPHDWLNGKEYKCKVSNKALPAPIEKTISKAKGQPREPQVYTLPPSRDELTKNQVSLTCLVKGFYPSDIAVEWESNGQPENNYKTTPPVLDSDGSFFLYSKLTVDKSRWQQGNVFSCSVMHEAAKFHYTQKSLSLSPGK

SEQ ID NO: 276 - protein, 227 aa, Artificial Sequence
  Amino acid sequence of Fc variant designated as SEQ ID NO. 276 in description
DKTHTCPPCPAPELLGGPSVFLFPPKPKDARHTSRTPEVTCVVVDVSHEDPEVKFNWYVDGVEVHNAKTKPREEQYNSTYRVVSVLTVLHQDWLNGKEYKCKVSNKALPAPIEKTISKAKGQPREPQVYTLPPSRDELTKNQVSLTCLVKGFYPSDIAVEWESNGQPENNYKTTPPVLDSDGSFFLYSKLTVDKSRWQQGNVFSCSVMHEAAKFHYTQKSLSLSPGK

SEQ ID NO: 277 - protein, 227 aa, Artificial Sequence
  Amino acid sequence of Fc variant designated as SEQ ID NO. 277 in description
DKTHTCPPCPAPELLGGPSVFLFPPKPKDVYQISRTPEVTCVVVDVSHEDPEVKFNWYVDGVEVHNAKTKPREEQYNSTYRVVSVLTVLHQDWLNGKEYKCKVSNKALPAPIEKTISKAKGQPREPQVYTLPPSRDELTKNQVSLTCLVKGFYPSDIAVEWESNGQPENNYKTTPPVLDSDGSFFLYSKLTVDKSRWQQGNVFSCSVMHEAAKFHYTQKSLSLSPGK

SEQ ID NO: 278 - protein, 227 aa, Artificial Sequence
  Amino acid sequence of Fc variant designated as SEQ ID NO. 278 in description
DKTHTCPPCPAPELLGGPSVFLFPPKPKDKCQNSRTPEVTCVVVDVSHEDPEVKFNWYVDGVEVHNAKTKPREEQYNSTYRVVSVLTVLHQDWLNGKEYKCKVSNKALPAPIEKTISKAKGQPREPQVYTLPPSRDELTKNQVSLTCLVKGFYPSDIAVEWESNGQPENNYKTTPPVLDSDGSFFLYSKLTVDKSRWQQGNVFSCSVMHEAAKFHYTQKSLSLSPGK

SEQ ID NO: 279 - protein, 227 aa, Artificial Sequence
  Amino acid sequence of Fc variant designated as SEQ ID NO. 279 in description
DKTHTCPPCPAPELLGGPSVFLFPPKPKDTLMYHQTPEVTCVVVDVSHEDPEVKFNWYVDGVEVHNAKTKPREEQYNSTYRVVSVLTVLHQDWLNGKEYKCKVSNKALPAPIEKTISKAKGQPREPQVYTLPPSRDELTKNQVSLTCLVKGFYPSDIAVEWESNGQPENNYKTTPPVLDSDGSFFLYSKLTVDKSRWQQGNVFSCSVMHEAAKFHYTQKSLSLSPGK

SEQ ID NO: 280 - protein, 227 aa, Artificial Sequence
  Amino acid sequence of Fc variant designated as SEQ ID NO. 280 in description
DKTHTCPPCPAPELLGGPSVFLFPPKPKDTVFPSRTPEVTCVVVDVSHEDPEVKFNWYVDGVEVHNAKTKPREEQYNSTYRVVSVLTVLHQDWLNGKEYKCKVSNKALPAPIEKTISKAKGQPREPQVYTLPPSRDELTKNQVSLTCLVKGFYPSDIAVEWESNGQPENNYKTTPPVLDSDGSFFLYSKLTVDKSRWQQGNVFSCSVMHEAAKFHYTQKSLSLSPGK

SEQ ID NO: 281 - protein, 227 aa, Artificial Sequence
  Amino acid sequence of Fc variant designated as SEQ ID NO. 281 in description
DKTHTCPPCPAPELLGGPSVFLFPPKPKDALMISRQQYRTCVVVDVSHEDPEVKFNWYVDGVEVHNAKTKPREEQYNSTYRVVSVLYDLHQDWLNGKEYKCKVSNKALPAPIEKTISKAKGQPREPQVYTLPPSRDELTKNQVSLTCLVKGFYPSDIAVEWESNGQPENNYKTTPPVLDSDGSFFLYSKLTVDKSRWQQGNVFSCSVMHEALHNHYTQKSLSLSPGK

SEQ ID NO: 282 - protein, 227 aa, Artificial Sequence
  Amino acid sequence of Fc variant designated as SEQ ID NO. 282 in description
DKTHTCPPCPAPELLGGPSVFLFPPKPKDALMISRTPEVTCVVVDVSHEDPEVKFNWYVDGVEVHNAKTKPREEQYNSTYRVVSVLYDLHQDWLNGKEYKCKVSNKALPAPIEKTISKAKGQPREPQVYTLPPSRDELTKNQVSLTCLVKGFYPSDIAVEWESNGQPENNYKTTPPVLDSDGSFFLYSKLTVDKSRWQQGNVFSCSVMHEAMPIPYTQKSLSLSPGK

SEQ ID NO: 283 - protein, 227 aa, Artificial Sequence
  Amino acid sequence of Fc variant designated as SEQ ID NO. 283 in description
DKTHTCPPCPAPELLGGPSVFLFPPKPKDALMISRTPEVTCVVVDVSHEDPEVKFNWYVDGVEVHNAKTKPREEQYNSTYRVVSVLYDLHQDWLNGKEYKCKVSNKALPAPIEKTISKAKGQPREPQVYTLPPSRDELTKNQVSLTCLVKGFYPSDIAVEWESNGQPENNYKTTPPVLDSDGSFFLYSKLTVDKSRWQQGNVFSCSVMHEAPMQHYTQKSLSLSPGK

SEQ ID NO: 284 - protein, 227 aa, Artificial Sequence
  Amino acid sequence of Fc variant designated as SEQ ID NO. 284 in description
DKTHTCPPCPAPELLGGPSVFLFPPKPKDALMISRTPWGTCVVVDVSHEDPEVKFNWYVDGVEVHNAKTKPREEQYNSTYRVVSVLYDLHQDWLNGKEYKCKVSNKALPAPIEKTISKAKGQPREPQVYTLPPSRDELTKNQVSLTCLVKGFYPSDIAVEWESNGQPENNYKTTPPVLDSDGSFFLYSKLTVDKSRWQQGNVFSCSVMHEALHTDFNQKSLSLSPGK

SEQ ID NO: 285 - protein, 227 aa, Artificial Sequence
  Amino acid sequence of Fc variant designated as SEQ ID NO. 285 in description
DKTHTCPPCPAPELLGGPSVFLFPPKPKDALMYHQTPEVTCVVVDVSHEDPEVKFNWYVDGVEVHNAKTKPREEQYNSTYRVVSVLYDLHQDWLNGKEYKCKVSNKALPAPIEKTISKAKGQPREPQVYTLPPSRDELTKNQVSLTCLVKGFYPSDIAVEWESNGQPENNYKTTPPVLDSDGSFFLYSKLTVDKSRWQQGNVFSCSVMHEALHNHYTQKSLSLSPGK

SEQ ID NO: 286 - protein, 227 aa, Artificial Sequence
  Amino acid sequence of Fc variant designated as SEQ ID NO. 286 in description
DKTHTCPPCPAPELLGGPSVFLFPPKPKDTLMISRQQYRTCVVVDVSHEDPEVKFNWYVDGVEVHNAKTKPREEQYNSTYRVVSVLQTSHQDWLNGKEYKCKVSNKALPAPIEKTISKAKGQPREPQVYTLPPSRDELTKNQVSLTCLVKGFYPSDIAVEWESNGQPENNYKTTPPVLDSDGSFFLYSKLTVDKSRWQQGNVFSCSVMHEALHNHYTQKSLSLSPGK

SEQ ID NO: 287 - protein, 227 aa, Artificial Sequence
  Amino acid sequence of Fc variant designated as SEQ ID NO. 287 in description
DKTHTCPPCPAPELLGGPSVFLFPPKPKDHEQQSRTPEVTCVVVDVSHEDPEVKFNWYVDGVEVHNAKTKPREEQYNSTYRVVSVLQTSHQDWLNGKEYKCKVSNKALPAPIEKTISKAKGQPREPQVYTLPPSRDELTKNQVSLTCLVKGFYPSDIAVEWESNGQPENNYKTTPPVLDSDGSFFLYSKLTVDKSRWQQGNVFSCSVMHEALHNHYTQKSLSLSPGK

SEQ ID NO: 288 - protein, 227 aa, Artificial Sequence
  Amino acid sequence of Fc variant designated as SEQ ID NO. 288 in description
DKTHTCPPCPAPELLGGPSVFLFPPKPKDTLMISRTPEVTCVVVDVSHEDPEVKFNWYVDGVEVHNAKTKPREEQYNSTYRVVSVLQTSHQDWLNGKEYKCKVSNKALPAPIEKTISKAKGQPREPQVYTLPPSRDELTKNQVSLTCLVKGFYPSDIAVEWESNGQPENNYKTTPPVLDSDGSFFLYSKLTVDKSRWQQGNVFSCSVMHEAMPIPYTQKSLSLSPGK

SEQ ID NO: 289 - protein, 227 aa, Artificial Sequence
  Amino acid sequence of Fc variant designated as SEQ ID NO. 289 in description
DKTHTCPPCPAPELLGGPSVFLFPPKPKDTLMISRTPEVTCVVVDVSHEDPEVKFNWYVDGVEVHNAKTKPREEQYNSTYRVVSVLQTSHQDWLNGKEYKCKVSNKALPAPIEKTISKAKGQPREPQVYTLPPSRDELTKNQVSLTCLVKGFYPSDIAVEWESNGQPENNYKTTPPVLDSDGSFFLYSKLTVDKSRWQQGNVFSCSVMHEAPMQHYTQKSLSLSPGK

SEQ ID NO: 290 - protein, 227 aa, Artificial Sequence
  Amino acid sequence of Fc variant designated as SEQ ID NO. 290 in description
DKTHTCPPCPAPELLGGPSVFLFPPKPKDAQYRSRTPEVTCVVVDVSHEDPEVKFNWYVDGVEVHNAKTKPREEQYNSTYRVVSVLQTSHQDWLNGKEYKCKVSNKALPAPIEKTISKAKGQPREPQVYTLPPSRDELTKNQVSLTCLVKGFYPSDIAVEWESNGQPENNYKTTPPVLDSDGSFFLYSKLTVDKSRWQQGNVFSCSVMHEAYRLPYTQKSLSLSPGK

SEQ ID NO: 291 - protein, 227 aa, Artificial Sequence
  Amino acid sequence of Fc variant designated as SEQ ID NO. 291 in description
DKTHTCPPCPAPELLGGPSVFLFPPKPKDTLMISRTPWGTCVVVDVSHEDPEVKFNWYVDGVEVHNAKTKPREEQYNSTYRVVSVLQTSHQDWLNGKEYKCKVSNKALPAPIEKTISKAKGQPREPQVYTLPPSRDELTKNQVSLTCLVKGFYPSDIAVEWESNGQPENNYKTTPPVLDSDGSFFLYSKLTVDKSRWQQGNVFSCSVMHEALHTDFNQKSLSLSPGK

SEQ ID NO: 292 - protein, 227 aa, Artificial Sequence
  Amino acid sequence of Fc variant designated as SEQ ID NO. 292 in description
DKTHTCPPCPAPELLGGPSVFLFPPKPKDARHTSRTPEVTCVVVDVSHEDPEVKFNWYVDGVEVHNAKTKPREEQYNSTYRVVSVLQTSHQDWLNGKEYKCKVSNKALPAPIEKTISKAKGQPREPQVYTLPPSRDELTKNQVSLTCLVKGFYPSDIAVEWESNGQPENNYKTTPPVLDSDGSFFLYSKLTVDKSRWQQGNVFSCSVMHEALHNHYTQKSLSLSPGK

SEQ ID NO: 293 - protein, 227 aa, Artificial Sequence
  Amino acid sequence of Fc variant designated as SEQ ID NO. 293 in description
DKTHTCPPCPAPELLGGPSVFLFPPKPKDVYQISRTPEVTCVVVDVSHEDPEVKFNWYVDGVEVHNAKTKPREEQYNSTYRVVSVLQTSHQDWLNGKEYKCKVSNKALPAPIEKTISKAKGQPREPQVYTLPPSRDELTKNQVSLTCLVKGFYPSDIAVEWESNGQPENNYKTTPPVLDSDGSFFLYSKLTVDKSRWQQGNVFSCSVMHEALHNHYTQKSLSLSPGK

SEQ ID NO: 294 - protein, 227 aa, Artificial Sequence
  Amino acid sequence of Fc variant designated as SEQ ID NO. 294 in description
DKTHTCPPCPAPELLGGPSVFLFPPKPKDKCQNSRTPEVTCVVVDVSHEDPEVKFNWYVDGVEVHNAKTKPREEQYNSTYRVVSVLQTSHQDWLNGKEYKCKVSNKALPAPIEKTISKAKGQPREPQVYTLPPSRDELTKNQVSLTCLVKGFYPSDIAVEWESNGQPENNYKTTPPVLDSDGSFFLYSKLTVDKSRWQQGNVFSCSVMHEALHNHYTQKSLSLSPGK

SEQ ID NO: 295 - protein, 227 aa, Artificial Sequence
  Amino acid sequence of Fc variant designated as SEQ ID NO. 295 in description
DKTHTCPPCPAPELLGGPSVFLFPPKPKDTLMYHQTPEVTCVVVDVSHEDPEVKFNWYVDGVEVHNAKTKPREEQYNSTYRVVSVLQTSHQDWLNGKEYKCKVSNKALPAPIEKTISKAKGQPREPQVYTLPPSRDELTKNQVSLTCLVKGFYPSDIAVEWESNGQPENNYKTTPPVLDSDGSFFLYSKLTVDKSRWQQGNVFSCSVMHEALHNHYTQKSLSLSPGK

SEQ ID NO: 296 - protein, 227 aa, Artificial Sequence
  Amino acid sequence of Fc variant designated as SEQ ID NO. 296 in description
DKTHTCPPCPAPELLGGPSVFLFPPKPKDTVFPSRTPEVTCVVVDVSHEDPEVKFNWYVDGVEVHNAKTKPREEQYNSTYRVVSVLQTSHQDWLNGKEYKCKVSNKALPAPIEKTISKAKGQPREPQVYTLPPSRDELTKNQVSLTCLVKGFYPSDIAVEWESNGQPENNYKTTPPVLDSDGSFFLYSKLTVDKSRWQQGNVFSCSVMHEALHNHYTQKSLSLSPGK

SEQ ID NO: 297 - protein, 227 aa, Artificial Sequence
  Amino acid sequence of Fc variant designated as SEQ ID NO. 297 in description
DKTHTCPPCPAPELLGGPSVFLFPPKPKDHEQQSRQQYRTCVVVDVSHEDPEVKFNWYVDGVEVHNAKTKPREEQYNSTYRVVSVLTVLHQDWLNGKEYKCKVSNKALPAPIEKTISKAKGQPREPQVYTLPPSRDELTKNQVSLTCLVKGFYPSDIAVEWESNGQPENNYKTTPPVLDSDGSFFLYSKLTVDKSRWQQGNVFSCSVMHEALHNHYTQKSLSLSPGK

SEQ ID NO: 298 - protein, 227 aa, Artificial Sequence
  Amino acid sequence of Fc variant designated as SEQ ID NO. 298 in description
DKTHTCPPCPAPELLGGPSVFLFPPKPKDTLMISRQQYRTCVVVDVSHEDPEVKFNWYVDGVEVHNAKTKPREEQYNSTYRVVSVLTVTPHDWLNGKEYKCKVSNKALPAPIEKTISKAKGQPREPQVYTLPPSRDELTKNQVSLTCLVKGFYPSDIAVEWESNGQPENNYKTTPPVLDSDGSFFLYSKLTVDKSRWQQGNVFSCSVMHEALHNHYTQKSLSLSPGK

SEQ ID NO: 299 - protein, 227 aa, Artificial Sequence
  Amino acid sequence of Fc variant designated as SEQ ID NO. 299 in description
DKTHTCPPCPAPELLGGPSVFLFPPKPKDTLMISRQQYRTCVVVDVSHEDPEVKFNWYVDGVEVHNAKTKPREEQYNSTYRVVSVLTVLHQDWLNGKEYKCKVSNKALPAPIEKTISKAKGQPREPQVYTLPPSRDELTKNQVSLTCLVKGFYPSDIAVEWESNGQPENNYKTTPPVLDSDGSFFLYSKLTVDKSRWQQGNVFSCSVMHEAMPIPYTQKSLSLSPGK

SEQ ID NO: 300 - protein, 227 aa, Artificial Sequence
  Amino acid sequence of Fc variant designated as SEQ ID NO. 300 in description
DKTHTCPPCPAPELLGGPSVFLFPPKPKDTLMISRQQYRTCVVVDVSHEDPEVKFNWYVDGVEVHNAKTKPREEQYNSTYRVVSVLTVLHQDWLNGKEYKCKVSNKALPAPIEKTISKAKGQPREPQVYTLPPSRDELTKNQVSLTCLVKGFYPSDIAVEWESNGQPENNYKTTPPVLDSDGSFFLYSKLTVDKSRWQQGNVFSCSVMHEAPMQHYTQKSLSLSPGK

SEQ ID NO: 301 - protein, 227 aa, Artificial Sequence
  Amino acid sequence of Fc variant designated as SEQ ID NO. 301 in description
DKTHTCPPCPAPELLGGPSVFLFPPKPKDTLMISRQQYRTCVVVDVSHEDPEVKFNWYVDGVEVHNAKTKPREEQYNSTYRVVSVLTSQVNDWLNGKEYKCKVSNKALPAPIEKTISKAKGQPREPQVYTLPPSRDELTKNQVSLTCLVKGFYPSDIAVEWESNGQPENNYKTTPPVLDSDGSFFLYSKLTVDKSRWQQGNVFSCSVMHEAQNNNYTQKSLSLSPGK

SEQ ID NO: 302 - protein, 227 aa, Artificial Sequence
  Amino acid sequence of Fc variant designated as SEQ ID NO. 302 in description
DKTHTCPPCPAPELLGGPSVFLFPPKPKDAQYRSRQQYRTCVVVDVSHEDPEVKFNWYVDGVEVHNAKTKPREEQYNSTYRVVSVLTVLHQDWLNGKEYKCKVSNKALPAPIEKTISKAKGQPREPQVYTLPPSRDELTKNQVSLTCLVKGFYPSDIAVEWESNGQPENNYKTTPPVLDSDGSFFLYSKLTVDKSRWQQGNVFSCSVMHEAYRLPYTQKSLSLSPGK

SEQ ID NO: 303 - protein, 227 aa, Artificial Sequence
  Amino acid sequence of Fc variant designated as SEQ ID NO. 303 in description
DKTHTCPPCPAPELLGGPSVFLFPPKPKDARHTSRQQYRTCVVVDVSHEDPEVKFNWYVDGVEVHNAKTKPREEQYNSTYRVVSVLTVLHQDWLNGKEYKCKVSNKALPAPIEKTISKAKGQPREPQVYTLPPSRDELTKNQVSLTCLVKGFYPSDIAVEWESNGQPENNYKTTPPVLDSDGSFFLYSKLTVDKSRWQQGNVFSCSVMHEALHNHYTQKSLSLSPGK

SEQ ID NO: 304 - protein, 227 aa, Artificial Sequence
  Amino acid sequence of Fc variant designated as SEQ ID NO. 304 in description
DKTHTCPPCPAPELLGGPSVFLFPPKPKDVYQISRQQYRTCVVVDVSHEDPEVKFNWYVDGVEVHNAKTKPREEQYNSTYRVVSVLTVLHQDWLNGKEYKCKVSNKALPAPIEKTISKAKGQPREPQVYTLPPSRDELTKNQVSLTCLVKGFYPSDIAVEWESNGQPENNYKTTPPVLDSDGSFFLYSKLTVDKSRWQQGNVFSCSVMHEALHNHYTQKSLSLSPGK

SEQ ID NO: 305 - protein, 227 aa, Artificial Sequence
  Amino acid sequence of Fc variant designated as SEQ ID NO. 305 in description
DKTHTCPPCPAPELLGGPSVFLFPPKPKDKCQNSRQQYRTCVVVDVSHEDPEVKFNWYVDGVEVHNAKTKPREEQYNSTYRVVSVLTVLHQDWLNGKEYKCKVSNKALPAPIEKTISKAKGQPREPQVYTLPPSRDELTKNQVSLTCLVKGFYPSDIAVEWESNGQPENNYKTTPPVLDSDGSFFLYSKLTVDKSRWQQGNVFSCSVMHEALHNHYTQKSLSLSPGK

SEQ ID NO: 306 - protein, 227 aa, Artificial Sequence
  Amino acid sequence of Fc variant designated as SEQ ID NO. 306 in description
DKTHTCPPCPAPELLGGPSVFLFPPKPKDTVFPSRQQYRTCVVVDVSHEDPEVKFNWYVDGVEVHNAKTKPREEQYNSTYRVVSVLTVLHQDWLNGKEYKCKVSNKALPAPIEKTISKAKGQPREPQVYTLPPSRDELTKNQVSLTCLVKGFYPSDIAVEWESNGQPENNYKTTPPVLDSDGSFFLYSKLTVDKSRWQQGNVFSCSVMHEALHNHYTQKSLSLSPGK

SEQ ID NO: 307 - protein, 227 aa, Artificial Sequence
  Amino acid sequence of Fc variant designated as SEQ ID NO. 307 in description
DKTHTCPPCPAPELLGGPSVFLFPPKPKDHEQQSRTPEVTCVVVDVSHEDPEVKFNWYVDGVEVHNAKTKPREEQYNSTYRVVSVLTVTPHDWLNGKEYKCKVSNKALPAPIEKTISKAKGQPREPQVYTLPPSRDELTKNQVSLTCLVKGFYPSDIAVEWESNGQPENNYKTTPPVLDSDGSFFLYSKLTVDKSRWQQGNVFSCSVMHEALHNHYTQKSLSLSPGK

SEQ ID NO: 308 - protein, 227 aa, Artificial Sequence
  Amino acid sequence of Fc variant designated as SEQ ID NO. 308 in description
DKTHTCPPCPAPELLGGPSVFLFPPKPKDHEQQSRTPEVTCVVVDVSHEDPEVKFNWYVDGVEVHNAKTKPREEQYNSTYRVVSVLTVLHQDWLNGKEYKCKVSNKALPAPIEKTISKAKGQPREPQVYTLPPSRDELTKNQVSLTCLVKGFYPSDIAVEWESNGQPENNYKTTPPVLDSDGSFFLYSKLTVDKSRWQQGNVFSCSVMHEAMPIPYTQKSLSLSPGK

SEQ ID NO: 309 - protein, 227 aa, Artificial Sequence
  Amino acid sequence of Fc variant designated as SEQ ID NO. 309 in description
DKTHTCPPCPAPELLGGPSVFLFPPKPKDHEQQSRTPEVTCVVVDVSHEDPEVKFNWYVDGVEVHNAKTKPREEQYNSTYRVVSVLTVLHQDWLNGKEYKCKVSNKALPAPIEKTISKAKGQPREPQVYTLPPSRDELTKNQVSLTCLVKGFYPSDIAVEWESNGQPENNYKTTPPVLDSDGSFFLYSKLTVDKSRWQQGNVFSCSVMHEAPMQHYTQKSLSLSPGK

SEQ ID NO: 310 - protein, 227 aa, Artificial Sequence
  Amino acid sequence of Fc variant designated as SEQ ID NO. 310 in description
DKTHTCPPCPAPELLGGPSVFLFPPKPKDHEQQSRTPEVTCVVVDVSHEDPEVKFNWYVDGVEVHNAKTKPREEQYNSTYRVVSVLTSQVNDWLNGKEYKCKVSNKALPAPIEKTISKAKGQPREPQVYTLPPSRDELTKNQVSLTCLVKGFYPSDIAVEWESNGQPENNYKTTPPVLDSDGSFFLYSKLTVDKSRWQQGNVFSCSVMHEAQNNNYTQKSLSLSPGK

SEQ ID NO: 311 - protein, 227 aa, Artificial Sequence
  Amino acid sequence of Fc variant designated as SEQ ID NO. 311 in description
DKTHTCPPCPAPELLGGPSVFLFPPKPKDHEQQSRTPWGTCVVVDVSHEDPEVKFNWYVDGVEVHNAKTKPREEQYNSTYRVVSVLTVLHQDWLNGKEYKCKVSNKALPAPIEKTISKAKGQPREPQVYTLPPSRDELTKNQVSLTCLVKGFYPSDIAVEWESNGQPENNYKTTPPVLDSDGSFFLYSKLTVDKSRWQQGNVFSCSVMHEALHTDFNQKSLSLSPGK

SEQ ID NO: 312 - protein, 227 aa, Artificial Sequence; identical to SEQ ID NO: 287
  Amino acid sequence of Fc variant designated as SEQ ID NO. 312 in description

SEQ ID NO: 313 - protein, 227 aa, Artificial Sequence
  Amino acid sequence of Fc variant designated as SEQ ID NO. 313 in description
DKTHTCPPCPAPELLGGPSVFLFPPKPKDHEQQHQTPEVTCVVVDVSHEDPEVKFNWYVDGVEVHNAKTKPREEQYNSTYRVVSVLTVLHQDWLNGKEYKCKVSNKALPAPIEKTISKAKGQPREPQVYTLPPSRDELTKNQVSLTCLVKGFYPSDIAVEWESNGQPENNYKTTPPVLDSDGSFFLYSKLTVDKSRWQQGNVFSCSVMHEALHNHYTQKSLSLSPGK

SEQ ID NO: 314 - protein, 227 aa, Artificial Sequence
  Amino acid sequence of Fc variant designated as SEQ ID NO. 314 in description
DKTHTCPPCPAPELLGGPSVFLFPPKPKDTLMISRTPEVTCVVVDVSHEDPEVKFNWYVDGVEVHNAKTKPREEQYNSTYRVVSVLTVTPHDWLNGKEYKCKVSNKALPAPIEKTISKAKGQPREPQVYTLPPSRDELTKNQVSLTCLVKGFYPSDIAVEWESNGQPENNYKTTPPVLDSDGSFFLYSKLTVDKSRWQQGNVFSCSVMHEAMPIPYTQKSLSLSPGK

SEQ ID NO: 315 - protein, 227 aa, Artificial Sequence
  Amino acid sequence of Fc variant designated as SEQ ID NO. 315 in description
DKTHTCPPCPAPELLGGPSVFLFPPKPKDTLMISRTPEVTCVVVDVSHEDPEVKFNWYVDGVEVHNAKTKPREEQYNSTYRVVSVLTVTPHDWLNGKEYKCKVSNKALPAPIEKTISKAKGQPREPQVYTLPPSRDELTKNQVSLTCLVKGFYPSDIAVEWESNGQPENNYKTTPPVLDSDGSFFLYSKLTVDKSRWQQGNVFSCSVMHEAPMQHYTQKSLSLSPGK

SEQ ID NO: 316 - protein, 227 aa, Artificial Sequence
  Amino acid sequence of Fc variant designated as SEQ ID NO. 316 in description
DKTHTCPPCPAPELLGGPSVFLFPPKPKDAQYRSRTPEVTCVVVDVSHEDPEVKFNWYVDGVEVHNAKTKPREEQYNSTYRVVSVLTVTPHDWLNGKEYKCKVSNKALPAPIEKTISKAKGQPREPQVYTLPPSRDELTKNQVSLTCLVKGFYPSDIAVEWESNGQPENNYKTTPPVLDSDGSFFLYSKLTVDKSRWQQGNVFSCSVMHEAYRLPYTQKSLSLSPGK

SEQ ID NO: 317 - protein, 227 aa, Artificial Sequence
  Amino acid sequence of Fc variant designated as SEQ ID NO. 317 in description
DKTHTCPPCPAPELLGGPSVFLFPPKPKDTLMISRTPWGTCVVVDVSHEDPEVKFNWYVDGVEVHNAKTKPREEQYNSTYRVVSVLTVTPHDWLNGKEYKCKVSNKALPAPIEKTISKAKGQPREPQVYTLPPSRDELTKNQVSLTCLVKGFYPSDIAVEWESNGQPENNYKTTPPVLDSDGSFFLYSKLTVDKSRWQQGNVFSCSVMHEALHTDFNQKSLSLSPGK

SEQ ID NO: 318 - protein, 227 aa, Artificial Sequence
  Amino acid sequence of Fc variant designated as SEQ ID NO. 318 in description
DKTHTCPPCPAPELLGGPSVFLFPPKPKDARHTSRTPEVTCVVVDVSHEDPEVKFNWYVDGVEVHNAKTKPREEQYNSTYRVVSVLTVTPHDWLNGKEYKCKVSNKALPAPIEKTISKAKGQPREPQVYTLPPSRDELTKNQVSLTCLVKGFYPSDIAVEWESNGQPENNYKTTPPVLDSDGSFFLYSKLTVDKSRWQQGNVFSCSVMHEALHNHYTQKSLSLSPGK

SEQ ID NO: 319 - protein, 227 aa, Artificial Sequence
  Amino acid sequence of Fc variant designated as SEQ ID NO. 319 in description
DKTHTCPPCPAPELLGGPSVFLFPPKPKDVYQISRTPEVTCVVVDVSHEDPEVKFNWYVDGVEVHNAKTKPREEQYNSTYRVVSVLTVTPHDWLNGKEYKCKVSNKALPAPIEKTISKAKGQPREPQVYTLPPSRDELTKNQVSLTCLVKGFYPSDIAVEWESNGQPENNYKTTPPVLDSDGSFFLYSKLTVDKSRWQQGNVFSCSVMHEALHNHYTQKSLSLSPGK

SEQ ID NO: 320 - protein, 227 aa, Artificial Sequence; identical to SEQ ID NO: 298
  Amino acid sequence of Fc variant designated as SEQ ID NO. 320 in description

SEQ ID NO: 321 - protein, 227 aa, Artificial Sequence
  Amino acid sequence of Fc variant designated as SEQ ID NO. 321 in description
DKTHTCPPCPAPELLGGPSVFLFPPKPKDKCQNSRTPEVTCVVVDVSHEDPEVKFNWYVDGVEVHNAKTKPREEQYNSTYRVVSVLTVTPHDWLNGKEYKCKVSNKALPAPIEKTISKAKGQPREPQVYTLPPSRDELTKNQVSLTCLVKGFYPSDIAVEWESNGQPENNYKTTPPVLDSDGSFFLYSKLTVDKSRWQQGNVFSCSVMHEALHNHYTQKSLSLSPGK

SEQ ID NO: 322 - protein, 227 aa, Artificial Sequence
  Amino acid sequence of Fc variant designated as SEQ ID NO. 322 in description
DKTHTCPPCPAPELLGGPSVFLFPPKPKDTLMYHQTPEVTCVVVDVSHEDPEVKFNWYVDGVEVHNAKTKPREEQYNSTYRVVSVLTVTPHDWLNGKEYKCKVSNKALPAPIEKTISKAKGQPREPQVYTLPPSRDELTKNQVSLTCLVKGFYPSDIAVEWESNGQPENNYKTTPPVLDSDGSFFLYSKLTVDKSRWQQGNVFSCSVMHEALHNHYTQKSLSLSPGK

SEQ ID NO: 323 - protein, 227 aa, Artificial Sequence
  Amino acid sequence of Fc variant designated as SEQ ID NO. 323 in description
DKTHTCPPCPAPELLGGPSVFLFPPKPKDTVFPSRTPEVTCVVVDVSHEDPEVKFNWYVDGVEVHNAKTKPREEQYNSTYRVVSVLTVTPHDWLNGKEYKCKVSNKALPAPIEKTISKAKGQPREPQVYTLPPSRDELTKNQVSLTCLVKGFYPSDIAVEWESNGQPENNYKTTPPVLDSDGSFFLYSKLTVDKSRWQQGNVFSCSVMHEALHNHYTQKSLSLSPGK

SEQ ID NO: 324 - protein, 227 aa, Artificial Sequence
  Amino acid sequence of Fc variant designated as SEQ ID NO. 324 in description
DKTHTCPPCPAPELLGGPSVFLFPPKPKDARHTSRTPEVTCVVVDVSHEDPEVKFNWYVDGVEVHNAKTKPREEQYNSTYRVVSVLTVLHQDWLNGKEYKCKVSNKALPAPIEKTISKAKGQPREPQVYTLPPSRDELTKNQVSLTCLVKGFYPSDIAVEWESNGQPENNYKTTPPVLDSDGSFFLYSKLTVDKSRWQQGNVFSCSVMHEAMPIPYTQKSLSLSPGK

SEQ ID NO: 325 - protein, 227 aa, Artificial Sequence
  Amino acid sequence of Fc variant designated as SEQ ID NO. 325 in description
DKTHTCPPCPAPELLGGPSVFLFPPKPKDVYQISRTPEVTCVVVDVSHEDPEVKFNWYVDGVEVHNAKTKPREEQYNSTYRVVSVLTVLHQDWLNGKEYKCKVSNKALPAPIEKTISKAKGQPREPQVYTLPPSRDELTKNQVSLTCLVKGFYPSDIAVEWESNGQPENNYKTTPPVLDSDGSFFLYSKLTVDKSRWQQGNVFSCSVMHEAMPIPYTQKSLSLSPGK

SEQ ID NO: 326 - protein, 227 aa, Artificial Sequence
  Amino acid sequence of Fc variant designated as SEQ ID NO. 326 in description
DKTHTCPPCPAPELLGGPSVFLFPPKPKDKCQNSRTPEVTCVVVDVSHEDPEVKFNWYVDGVEVHNAKTKPREEQYNSTYRVVSVLTVLHQDWLNGKEYKCKVSNKALPAPIEKTISKAKGQPREPQVYTLPPSRDELTKNQVSLTCLVKGFYPSDIAVEWESNGQPENNYKTTPPVLDSDGSFFLYSKLTVDKSRWQQGNVFSCSVMHEAMPIPYTQKSLSLSPGK

SEQ ID NO: 327 - protein, 227 aa, Artificial Sequence
  Amino acid sequence of Fc variant designated as SEQ ID NO. 327 in description
DKTHTCPPCPAPELLGGPSVFLFPPKPKDTLMYHQTPEVTCVVVDVSHEDPEVKFNWYVDGVEVHNAKTKPREEQYNSTYRVVSVLTVLHQDWLNGKEYKCKVSNKALPAPIEKTISKAKGQPREPQVYTLPPSRDELTKNQVSLTCLVKGFYPSDIAVEWESNGQPENNYKTTPPVLDSDGSFFLYSKLTVDKSRWQQGNVFSCSVMHEAMPIPYTQKSLSLSPGK

SEQ ID NO: 328 - protein, 227 aa, Artificial Sequence
  Amino acid sequence of Fc variant designated as SEQ ID NO. 328 in description
DKTHTCPPCPAPELLGGPSVFLFPPKPKDTVFPSRTPEVTCVVVDVSHEDPEVKFNWYVDGVEVHNAKTKPREEQYNSTYRVVSVLTVLHQDWLNGKEYKCKVSNKALPAPIEKTISKAKGQPREPQVYTLPPSRDELTKNQVSLTCLVKGFYPSDIAVEWESNGQPENNYKTTPPVLDSDGSFFLYSKLTVDKSRWQQGNVFSCSVMHEAMPIPYTQKSLSLSPGK

SEQ ID NO: 329 - protein, 227 aa, Artificial Sequence
  Amino acid sequence of Fc variant designated as SEQ ID NO. 329 in description
DKTHTCPPCPAPELLGGPSVFLFPPKPKDARHTSRTPEVTCVVVDVSHEDPEVKFNWYVDGVEVHNAKTKPREEQYNSTYRVVSVLTVLHQDWLNGKEYKCKVSNKALPAPIEKTISKAKGQPREPQVYTLPPSRDELTKNQVSLTCLVKGFYPSDIAVEWESNGQPENNYKTTPPVLDSDGSFFLYSKLTVDKSRWQQGNVFSCSVMHEAPMQHYTQKSLSLSPGK

SEQ ID NO: 330 - protein, 227 aa, Artificial Sequence
  Amino acid sequence of Fc variant designated as SEQ ID NO. 330 in description
DKTHTCPPCPAPELLGGPSVFLFPPKPKDVYQISRTPEVTCVVVDVSHEDPEVKFNWYVDGVEVHNAKTKPREEQYNSTYRVVSVLTVLHQDWLNGKEYKCKVSNKALPAPIEKTISKAKGQPREPQVYTLPPSRDELTKNQVSLTCLVKGFYPSDIAVEWESNGQPENNYKTTPPVLDSDGSFFLYSKLTVDKSRWQQGNVFSCSVMHEAPMQHYTQKSLSLSPGK

SEQ ID NO: 331 - protein, 227 aa, Artificial Sequence
  Amino acid sequence of Fc variant designated as SEQ ID NO. 331 in description
DKTHTCPPCPAPELLGGPSVFLFPPKPKDKCQNSRTPEVTCVVVDVSHEDPEVKFNWYVDGVEVHNAKTKPREEQYNSTYRVVSVLTVLHQDWLNGKEYKCKVSNKALPAPIEKTISKAKGQPREPQVYTLPPSRDELTKNQVSLTCLVKGFYPSDIAVEWESNGQPENNYKTTPPVLDSDGSFFLYSKLTVDKSRWQQGNVFSCSVMHEAPMQHYTQKSLSLSPGK

SEQ ID NO: 332 - protein, 227 aa, Artificial Sequence
  Amino acid sequence of Fc variant designated as SEQ ID NO. 332 in description
DKTHTCPPCPAPELLGGPSVFLFPPKPKDTLMYHQTPEVTCVVVDVSHEDPEVKFNWYVDGVEVHNAKTKPREEQYNSTYRVVSVLTVLHQDWLNGKEYKCKVSNKALPAPIEKTISKAKGQPREPQVYTLPPSRDELTKNQVSLTCLVKGFYPSDIAVEWESNGQPENNYKTTPPVLDSDGSFFLYSKLTVDKSRWQQGNVFSCSVMHEAPMQHYTQKSLSLSPGK

SEQ ID NO: 333 - protein, 227 aa, Artificial Sequence
  Amino acid sequence of Fc variant designated as SEQ ID NO. 333 in description
DKTHTCPPCPAPELLGGPSVFLFPPKPKDTVFPSRTPEVTCVVVDVSHEDPEVKFNWYVDGVEVHNAKTKPREEQYNSTYRVVSVLTVLHQDWLNGKEYKCKVSNKALPAPIEKTISKAKGQPREPQVYTLPPSRDELTKNQVSLTCLVKGFYPSDIAVEWESNGQPENNYKTTPPVLDSDGSFFLYSKLTVDKSRWQQGNVFSCSVMHEAPMQHYTQKSLSLSPGK

SEQ ID NO: 334 - protein, 227 aa, Artificial Sequence
  Amino acid sequence of Fc variant designated as SEQ ID NO. 334 in description
DKTHTCPPCPAPELLGGPSVFLFPPKPKDARHTSRTPEVTCVVVDVSHEDPEVKFNWYVDGVEVHNAKTKPREEQYNSTYRVVSVLTSQVNDWLNGKEYKCKVSNKALPAPIEKTISKAKGQPREPQVYTLPPSRDELTKNQVSLTCLVKGFYPSDIAVEWESNGQPENNYKTTPPVLDSDGSFFLYSKLTVDKSRWQQGNVFSCSVMHEAQNNNYTQKSLSLSPGK

SEQ ID NO: 335 - protein, 227 aa, Artificial Sequence
  Amino acid sequence of Fc variant designated as SEQ ID NO. 335 in description
DKTHTCPPCPAPELLGGPSVFLFPPKPKDVYQISRTPEVTCVVVDVSHEDPEVKFNWYVDGVEVHNAKTKPREEQYNSTYRVVSVLTSQVNDWLNGKEYKCKVSNKALPAPIEKTISKAKGQPREPQVYTLPPSRDELTKNQVSLTCLVKGFYPSDIAVEWESNGQPENNYKTTPPVLDSDGSFFLYSKLTVDKSRWQQGNVFSCSVMHEAQNNNYTQKSLSLSPGK

SEQ ID NO: 336 - protein, 227 aa, Artificial Sequence
  Amino acid sequence of Fc variant designated as SEQ ID NO. 336 in description
DKTHTCPPCPAPELLGGPSVFLFPPKPKDKCQNSRTPEVTCVVVDVSHEDPEVKFNWYVDGVEVHNAKTKPREEQYNSTYRVVSVLTSQVNDWLNGKEYKCKVSNKALPAPIEKTISKAKGQPREPQVYTLPPSRDELTKNQVSLTCLVKGFYPSDIAVEWESNGQPENNYKTTPPVLDSDGSFFLYSKLTVDKSRWQQGNVFSCSVMHEAQNNNYTQKSLSLSPGK

SEQ ID NO: 337 - protein, 227 aa, Artificial Sequence
  Amino acid sequence of Fc variant designated as SEQ ID NO. 337 in description
DKTHTCPPCPAPELLGGPSVFLFPPKPKDTLMYHQTPEVTCVVVDVSHEDPEVKFNWYVDGVEVHNAKTKPREEQYNSTYRVVSVLTSQVNDWLNGKEYKCKVSNKALPAPIEKTISKAKGQPREPQVYTLPPSRDELTKNQVSLTCLVKGFYPSDIAVEWESNGQPENNYKTTPPVLDSDGSFFLYSKLTVDKSRWQQGNVFSCSVMHEAQNNNYTQKSLSLSPGK

SEQ ID NO: 338 - protein, 227 aa, Artificial Sequence
  Amino acid sequence of Fc variant designated as SEQ ID NO. 338 in description
DKTHTCPPCPAPELLGGPSVFLFPPKPKDTVFPSRTPEVTCVVVDVSHEDPEVKFNWYVDGVEVHNAKTKPREEQYNSTYRVVSVLTSQVNDWLNGKEYKCKVSNKALPAPIEKTISKAKGQPREPQVYTLPPSRDELTKNQVSLTCLVKGFYPSDIAVEWESNGQPENNYKTTPPVLDSDGSFFLYSKLTVDKSRWQQGNVFSCSVMHEAQNNNYTQKSLSLSPGK

SEQ ID NO: 339 - protein, 227 aa, Artificial Sequence
  Amino acid sequence of Fc variant designated as SEQ ID NO. 339 in description
DKTHTCPPCPAPELLGGPSVFLFPPKPKDAQYRHQTPEVTCVVVDVSHEDPEVKFNWYVDGVEVHNAKTKPREEQYNSTYRVVSVLTVLHQDWLNGKEYKCKVSNKALPAPIEKTISKAKGQPREPQVYTLPPSRDELTKNQVSLTCLVKGFYPSDIAVEWESNGQPENNYKTTPPVLDSDGSFFLYSKLTVDKSRWQQGNVFSCSVMHEAYRLPYTQKSLSLSPGK

SEQ ID NO: 340 - protein, 227 aa, Artificial Sequence
  Amino acid sequence of Fc variant designated as SEQ ID NO. 340 in description
DKTHTCPPCPAPELLGGPSVFLFPPKPKDARHTSRTPWGTCVVVDVSHEDPEVKFNWYVDGVEVHNAKTKPREEQYNSTYRVVSVLTVLHQDWLNGKEYKCKVSNKALPAPIEKTISKAKGQPREPQVYTLPPSRDELTKNQVSLTCLVKGFYPSDIAVEWESNGQPENNYKTTPPVLDSDGSFFLYSKLTVDKSRWQQGNVFSCSVMHEALHTDFNQKSLSLSPGK

SEQ ID NO: 341 - protein, 227 aa, Artificial Sequence
  Amino acid sequence of Fc variant designated as SEQ ID NO. 341 in description
DKTHTCPPCPAPELLGGPSVFLFPPKPKDVYQISRTPWGTCVVVDVSHEDPEVKFNWYVDGVEVHNAKTKPREEQYNSTYRVVSVLTVLHQDWLNGKEYKCKVSNKALPAPIEKTISKAKGQPREPQVYTLPPSRDELTKNQVSLTCLVKGFYPSDIAVEWESNGQPENNYKTTPPVLDSDGSFFLYSKLTVDKSRWQQGNVFSCSVMHEALHTDFNQKSLSLSPGK

SEQ ID NO: 342 - protein, 227 aa, Artificial Sequence
  Amino acid sequence of Fc variant designated as SEQ ID NO. 342 in description
DKTHTCPPCPAPELLGGPSVFLFPPKPKDKCQNSRTPWGTCVVVDVSHEDPEVKFNWYVDGVEVHNAKTKPREEQYNSTYRVVSVLTVLHQDWLNGKEYKCKVSNKALPAPIEKTISKAKGQPREPQVYTLPPSRDELTKNQVSLTCLVKGFYPSDIAVEWESNGQPENNYKTTPPVLDSDGSFFLYSKLTVDKSRWQQGNVFSCSVMHEALHTDFNQKSLSLSPGK

SEQ ID NO: 343 - protein, 227 aa, Artificial Sequence
  Amino acid sequence of Fc variant designated as SEQ ID NO. 343 in description
DKTHTCPPCPAPELLGGPSVFLFPPKPKDTVFPSRTPWGTCVVVDVSHEDPEVKFNWYVDGVEVHNAKTKPREEQYNSTYRVVSVLTVLHQDWLNGKEYKCKVSNKALPAPIEKTISKAKGQPREPQVYTLPPSRDELTKNQVSLTCLVKGFYPSDIAVEWESNGQPENNYKTTPPVLDSDGSFFLYSKLTVDKSRWQQGNVFSCSVMHEALHTDFNQKSLSLSPGK

SEQ ID NO: 344 - protein, 227 aa, Artificial Sequence
  Amino acid sequence of Fc variant designated as SEQ ID NO. 344 in description
DKTHTCPPCPAPELLGGPSVFLFPPKPKDARHTHQTPEVTCVVVDVSHEDPEVKFNWYVDGVEVHNAKTKPREEQYNSTYRVVSVLTVLHQDWLNGKEYKCKVSNKALPAPIEKTISKAKGQPREPQVYTLPPSRDELTKNQVSLTCLVKGFYPSDIAVEWESNGQPENNYKTTPPVLDSDGSFFLYSKLTVDKSRWQQGNVFSCSVMHEALHNHYTQKSLSLSPGK

SEQ ID NO: 345 - protein, 227 aa, Artificial Sequence
  Amino acid sequence of Fc variant designated as SEQ ID NO. 345 in description
DKTHTCPPCPAPELLGGPSVFLFPPKPKDVYQYHQTPEVTCVVVDVSHEDPEVKFNWYVDGVEVHNAKTKPREEQYNSTYRVVSVLTVLHQDWLNGKEYKCKVSNKALPAPIEKTISKAKGQPREPQVYTLPPSRDELTKNQVSLTCLVKGFYPSDIAVEWESNGQPENNYKTTPPVLDSDGSFFLYSKLTVDKSRWQQGNVFSCSVMHEALHNHYTQKSLSLSPGK

SEQ ID NO: 346 - protein, 227 aa, Artificial Sequence
  Amino acid sequence of Fc variant designated as SEQ ID NO. 346 in description
DKTHTCPPCPAPELLGGPSVFLFPPKPKDKCQNHQTPEVTCVVVDVSHEDPEVKFNWYVDGVEVHNAKTKPREEQYNSTYRVVSVLTVLHQDWLNGKEYKCKVSNKALPAPIEKTISKAKGQPREPQVYTLPPSRDELTKNQVSLTCLVKGFYPSDIAVEWESNGQPENNYKTTPPVLDSDGSFFLYSKLTVDKSRWQQGNVFSCSVMHEALHNHYTQKSLSLSPGK

SEQ ID NO: 347 - protein, 227 aa, Artificial Sequence
  Amino acid sequence of Fc variant designated as SEQ ID NO. 347 in description
DKTHTCPPCPAPELLGGPSVFLFPPKPKDTVFPHQTPEVTCVVVDVSHEDPEVKFNWYVDGVEVHNAKTKPREEQYNSTYRVVSVLTVLHQDWLNGKEYKCKVSNKALPAPIEKTISKAKGQPREPQVYTLPPSRDELTKNQVSLTCLVKGFYPSDIAVEWESNGQPENNYKTTPPVLDSDGSFFLYSKLTVDKSRWQQGNVFSCSVMHEALHNHYTQKSLSLSPGK
